(19) United States
(12) Patent Application Publication
(10) Pub. No.: US 2015/0132339 A1
(43) Pub. Date: May 14, 2015

(54) ADJUVANTED FORMULATIONS OF STREPTOCOCCUS PNEUMONIAE ANTIGENS

(71) Applicant: NOVARTIS AG, Basel (CH)

(72) Inventors: Simone Bufali, Siena (IT); Paolo Costantino, Colle di val D'Elsa (IT); Michele Pallaoro, Siena (IT); Derek O'hagan, Winchester, MA (US); Rino Rappuoli, Castelnuovo Berardenga (IT); Manmohan Singh, Cary, NC (US)

(21) Appl. No.: 14/381,090

(22) PCT Filed: Mar. 7, 2013
(86) PCT No.: PCT/EP2013/054545

§ 371 Date: Aug. 26, 2014

Related U.S. Application Data
(60) Provisional application No. 61/607,987, filed on Mar. 7, 2012.
(60) Provisional application No. 61/608,013, filed on Mar. 7, 2012.

(51) Int. Cl. A61K 39/09; A61K 33/08; A61K 31/4745; A61K 39/39

(52) U.S. Cl. CPC A61K 39/092; A61K 39/39; A61K 33/08; A61K 31/4745; A61K 2039/55505
USPC 424/197.11; 424/244.1

(57) ABSTRACT

The efficacy of S. pneumoniae vaccines can be enhanced by adjuvanting S. pneumoniae saccharide and/or protein antigens with a mixture of a TLR agonist (preferably a TLR7 agonist) and an insoluble metal salt (preferably an aluminium salt). The TLR agonist is typically adsorbed to the metal salt. The S. pneumoniae antigen can also be adsorbed to the metal salt.

[0001] This application claims the benefit of U.S. provisional applications 61/607,987 and 61/608,013 (both filed Mar. 7, 2012), the complete contents of both of which are hereby incorporated herein by reference for all purposes.

### TECHNICAL FIELD

[0002] The invention is in the field of adjuvanting antigens (particularly protein or saccharide antigens) from Streptococcus pneumoniae to increase their immunogenicity.

### BACKGROUND ART

[0003] There are currently two main types of pneumococcal vaccine. Pneumococcal conjugate vaccine (PCV) is given to all children under two years of age as part of the childhood vaccination programme, and pneumococcal polysaccharide vaccine (PPV) is given to people who are 65 years of age or over, and people at high risk. A 7-valent conjugate vaccine (PCV7, Prevnar, Pfizer) was licensed in 2000 and contains saccharides from serotypes 4, 6B, 9V, 14, 18C, 19F, 23F, which are the serotypes most commonly causing invasive pneumococcal disease among young children in North America. PCV10 (Synflorix, GlaxoSmithKline) was licensed for use in Canada, Australia, and

[0004] Europe in 2008/09 and contains PCV7 serotypes plus serotypes 1, 5, and 7F. PCV13 (Prevnarl3, Pfizer) added serotypes 3, 6A, and 19A to the PCV10 serotypes and was licensed in Chile and European in 2009. PPV23 (Pneumovax, Merck) is a 23-valent formulation of polysaccharide serotypes 1, 2, 3, 4, 5, 6B, 7F, 8, 9N, 9V, 10A, 11A, 12F, 14, 15B, 17F, 18C, 19A, 19F, 20, 22F, 23F, and 33F. These vaccines induce anti-capsular antibodies to the specific pneumococcal serotype included in the formulation and have been shown to be protective against invasive disease, especially septicemia and meningitis. PPV23 is unadjuvanted, but all of the conjugated vaccines include an aluminium salt adjuvant.

[0005] In addition to these saccharide-based compositions, vaccines comprising S. pneumoniae protein antigens are known in the art. References 1 and 231 describe protective immunogenic compositions comprising S. pneumoniae pilus proteins adjuvanted with an aluminium salt.

[0006] It is an object of the invention to provide further adjuvanted immunogenic compositions for protecting against S. pneumoniae, and in particular to provide compositions which are superior to those adjuvanted with aluminium salts.

### DISCLOSURE OF THE INVENTION

[0007] The inventors have found that the efficacy of S. pneumoniae vaccines can be enhanced by adjuvanting S. pneumoniae antigens with a mixture of a TLR agonist (preferably a TLR7 agonist, such as compound ‘K2’ identified below) and an insoluble metal salt (preferably an aluminium salt). The TLR agonist is typically adsorbed to the metal salt, as disclosed in reference 2. A S. pneumoniae antigen can also be adsorbed to the metal salt. In some embodiments the S. pneumoniae antigen is a S. pneumoniae saccharide antigen; in other embodiments the S. pneumoniae antigen is a S. pneumoniae protein antigen.

[0008] In a first aspect, the invention provides an immunogenic composition comprising (i) a TLR agonist (ii) an insoluble metal salt and (iii) one or more S. pneumoniae saccharide antigens, wherein the TLR agonist is an agonist of human TLR7.

[0009] In a second aspect, the invention provides an immunogenic composition comprising (i) a TLR agonist (ii) an insoluble metal salt and (iii) one or more S. pneumoniae saccharide antigens, wherein the insoluble metal salt is an aluminium salt.

[0010] In a third aspect, the invention provides an immunogenic composition comprising (i) a TLR agonist (ii) an insoluble metal salt, (iii) a buffer and (iv) one or more S. pneumoniae saccharide antigens.

[0011] In a fourth aspect, the invention provides an immunogenic composition comprising (i) a TLR agonist (ii) an insoluble metal salt and (iii) one or more S. pneumoniae saccharide antigens, wherein the pH of the composition is between 6 and 8, preferably between 6 and 7.

[0012] In a fifth aspect, the invention provides an immunogenic composition comprising (i) a TLR agonist (ii) an insoluble metal salt and (iii) one or more S. pneumoniae saccharide antigens, wherein at least one of the one or more S. pneumoniae saccharide antigens is conjugated to CRM197, and optionally wherein the composition does not include diphtheria toxoid, tetanus toxoid and pertussis toxoid.

[0013] In a sixth aspect, the invention provides an immunogenic composition comprising (i) a TLR agonist (ii) an insoluble metal salt and (iii) one or more S. pneumoniae saccharide antigens selected from 2-10 different serotypes, or 12 or more different serotypes; and optionally wherein the composition does not include diphtheria toxoid, tetanus toxoid and pertussis toxoid.

[0014] In a seventh aspect, the invention provides an immunogenic composition comprising (i) a TLR agonist (ii) an insoluble metal salt and (iii) S. pneumoniae saccharide antigens from precisely 11 different serotypes, provided that the 11 different serotypes are not serotypes 1, 3, 4, 5, 6B, 7F, 9V, 14, 18C, 19F and 23F.

[0015] In an eighth aspect, the invention provides an immunogenic composition comprising (i) a TLR agonist (ii) an insoluble metal salt and (iii) one or more S. pneumoniae saccharide antigens, wherein at least one of said one or more S. pneumoniae saccharide antigens is conjugated directly to a carrier, preferably by reductive amination.

[0016] In a ninth aspect, the invention provides an immunogenic composition comprising (i) a TLR agonist (ii) an insoluble metal salt and (iii) one or more S. pneumoniae saccharide antigens, wherein at least one of said one or more S. pneumoniae saccharide antigens is conjugated to a carrier via a linker.

[0017] In a tenth aspect, the invention provides an immunogenic composition comprising: (i) an aluminium hydroxide adjuvant; (ii) a TLR7 agonist of formula (K); (iii) S. pneumoniae saccharide antigens from serotypes 1, 5, 6B, 14, and 23F, in which each saccharide is conjugated to CRM197; in which the TLR7 agonist and/or at least one of the saccharides is/are adsorbed to the aluminium hydroxide adjuvant.

[0018] In an eleventh aspect, the invention provides an immunogenic composition comprising: (i) an aluminium hydroxide adjuvant; (ii) a TLR7 agonist of formula (K); (iii) S. pneumoniae saccharide antigen from only serotype 5 conjugated to CRM197; in which the TLR7 agonist and/or at least one of the saccharides is/are adsorbed to the aluminium hydroxide adjuvant.

[0019] In a twelfth aspect, the invention provides an immunogenic composition comprising: (a) an adjuvant complex comprising a first TLR agonist adsorbed to an insoluble metal salt; (b) an adjuvant complex comprising a second TLR agonist adsorbed to an insoluble metal salt; and (c) at least one S. pneumoniae saccharide antigen, wherein the saccharide antigen(s) are preferably adsorbed to the metal salt(s).

[0020] In a thirteenth aspect, the invention provides a process for preparing an immunogenic composition, wherein the process comprises mixing a TLR agonist, an insoluble metal salt, and S. pneumoniae saccharide antigen(s).

[0021] In a fourteenth aspect, the invention provides a process for preparing an immunogenic composition, comprising one of: (i) combining a S. pneumoniae saccharide antigen with a mixture comprising a TLR agonist and an insoluble metal salt; (ii) combining an insoluble metal salt with a mixture comprising a TLR agonist and a S. pneumoniae saccharide antigen; or (iii) combining a TLR agonist with a mixture comprising an insoluble metal salt and a S. pneumoniae saccharide antigen.

[0022] In a fifteenth aspect, the invention provides a process for preparing an immunogenic composition, comprising steps of (i) preparing an aqueous mixture of a TLR agonist and a soluble aluminium salt; then (ii) adding a non-aluminium salt to the aqueous mixture in order to form a precipitated aluminium salt to which the TLR agonist is adsorbed; and (iii) adding S. pneumoniae saccharide antigen(s) in step (i), step (ii), and/or a third step. The invention also provides an immunogenic composition obtained or obtainable by this process.

[0023] In a sixteenth aspect, the invention provides a process for preparing an immunogenic composition, comprising a step of mixing (i) an aqueous mixture of a TLR agonist and a soluble aluminium salt with (ii) a buffered aqueous mixture of a S. pneumoniae saccharide immunogen, wherein the mixing step causes precipitation of an aluminium salt to which the TLR agonist and the immunogen are adsorbed. The invention also provides an immunogenic composition obtained or obtainable by this process.

[0024] In a seventeenth aspect, the invention provides a process for preparing a sterile immunogenic composition, comprising steps of combining (i) a S. pneumoniae saccharide immunogen with (ii) a sterile complex of a TLR agonist and an insoluble metal salt. This process may comprise e.g. the steps of (a) mixing a TLR agonist and an insoluble metal salt such that the TLR agonist adsorbs to the insoluble metal salt to form the complex; and (b) sterilising the complex. As an alternative, this process may comprise e.g. the steps of (a) sterilising a solution or suspension of a TLR agonist and (b) combining the sterilised solution or suspension with a sterile insoluble metal salt; or by (a) sterilising an insoluble metal salt and (b) combining the sterilised insoluble metal salt with a sterile solution or suspension of a TLR agonist; or by combining (a) a sterile solution or suspension of a TLR agonist with (b) a sterile insoluble metal salt. Sterilisation of the TLR agonist solution/suspension may be achieved by sterile filtration. Sterilisation of the insoluble metal salt may be achieved by autoclaving.

[0025] In an 18th aspect, the invention provides an immunogenic composition comprising (i) a TLR agonist (ii) an insoluble metal salt and (iii) one or more S. pneumoniae protein antigens, wherein the TLR agonist is an agonist of human TLR7.

[0026] In a 19th aspect, the invention provides an immunogenic composition comprising (i) a TLR agonist (ii) an insoluble metal salt and (iii) one or more S. pneumoniae protein antigens, wherein the insoluble metal salt is an aluminium salt.

[0027] In a 20th aspect, the invention provides an immunogenic composition comprising (i) a TLR agonist (ii) an insoluble metal salt, (iii) a buffer and (iv) one or more S. pneumoniae protein antigens.

[0028] In a 21st aspect, the invention provides an immunogenic composition comprising (i) a TLR agonist (ii) an insoluble metal salt and (iii) one or more S. pneumoniae protein antigens, wherein the pH of the composition is between 6 and 8, preferably between 6 and 7.

[0029] In a 22nd aspect, the invention provides an immunogenic composition comprising (i) a TLR agonist (ii) an insoluble metal salt and (iii) at least two of:

[0030] (a) a first polypeptide comprising a first amino acid sequence, where the first amino acid sequence comprises an amino acid sequence (i) having at least 90% sequence identity to SEQ ID NO: 236 and/or (ii) consisting of a fragment of at least 7 contiguous amino acids from SEQ ID NO: 236;

[0031] (b) a second polypeptide, comprising a second amino acid sequence, where the second amino acid sequence comprises an amino acid sequence (i) having at least 90% sequence identity to SEQ ID NO: 237 and/or (ii) consisting of a fragment of at least 7 contiguous amino acids from SEQ ID NO:237; and/or

[0032] (c) a third polypeptide, comprising a third amino acid sequence, where the third amino acid sequence comprises an amino acid sequence (i) having at least 90% sequence identity to SEQ ID NO: 238 and/or (ii) consisting of a fragment of at least 7 contiguous amino acids from SEQ ID NO: 238.

[0033] In a 23rd aspect, the invention provides an immunogenic composition comprising (i) a TLR agonist (ii) an insoluble metal salt, and (iii) a polypeptide comprising amino acid sequence:

A-{1-X-L-}ₙ-B

wherein: each X is an amino acid sequence of first polypeptide, second polypeptide or third polypeptide as defined in the 22nd aspect; L is an optional linker amino acid sequence; A is an optional N terminal amino acid sequence; B is an optional C terminal amino acid sequence; n is an integer of 2 or more.

[0034] In a 24th aspect, the invention provides an immunogenic composition comprising (i) a TLR agonist (ii) an insoluble metal salt and (iii) a protein antigencomprising the amino acid sequence of: SEQ ID NOs: 246, 248, 250, 252, 254 or 256.

[0035] In a 25th aspect, the invention provides an immunogenic composition comprising (i) a TLR agonist (ii) an insoluble metal salt and (iii) a polypeptide comprising amino acid sequence SEQ ID NO: 318.

[0036] In a 26th aspect, the invention provides an immunogenic composition comprising (i) a TLR agonist (ii) an insoluble metal salt and (iii) an immunogenic composition comprising: (a) a first polypeptide comprising a first amino acid sequence, where the first amino acid sequence comprises or consists of: SEQ ID NO.335, or an amino acid sequence having at least 80% sequence identity to SEQ ID NO: 335, or an amino acid sequence that competes with SEQ ID NO: 335 for binding to an antibody raised against SEQ ID NO: 335, or a fragment of at least 7 amino acids of SEQ ID NO: 335; and/or (b) a second polypeptide, comprising a second amino acid sequence, where the second amino acid sequence comprises or consists of: SEQ ID NO: 336, or an amino acid sequence having at least 80% sequence identity to SEQ ID NO: 336, or an amino acid sequence that competes with SEQ ID NO: 336 for binding to an antibody raised against SEQ ID NO: 336, or a fragment of at least 7 amino acids of SEQ ID NO: 336; and/or (c) a third polypeptide, comprising a third amino acid sequence, where the third amino acid sequence comprises or consists of: SEQ ID NO: 337, or an amino acid sequence having at least 80% sequence identity to SEQ ID NO: 337, or an amino acid sequence that competes with SEQ ID NO: 337 for binding to an antibody raised against SEQ ID NO: 337, or a fragment of at least 7 amino acids of SEQ ID NO: 337; and/or (d) a fourth polypeptide, comprising a fourth amino acid sequence, where the fourth amino acid sequence comprises or consists of: SEQ ID NO: 338, or an amino acid sequence having at least 80% sequence identity to SEQ ID NO: 338, or an amino acid sequence that competes with SEQ ID NO: 338 for binding to an antibody raised against SEQ ID NO: 338, or a fragment of at least 7 amino acids of SEQ ID NO: 338; and/or (e) a fifth polypeptide, comprising a fifth amino acid sequence, where the fifth amino acid sequence comprises or consists of: SEQ ID NO: 339, or an amino acid sequence having at least 80% sequence identity to SEQ ID NO: 339, or an amino acid sequence that competes with SEQ ID NO: 339 for binding to an antibody raised against SEQ ID NO: 339, or a fragment of at least 7 amino acids of SEQ ID NO: 339; and/or (f) a sixth polypeptide, comprising a sixth amino acid sequence, where the sixth amino acid sequence comprises or consists of: SEQ ID NO: 340, or an amino acid sequence having at least 80% sequence identity to SEQ ID NO: 340, or an amino acid sequence that competes with SEQ ID NO: 340 for binding to an antibody raised against SEQ ID NO: 340, or a fragment of at least 7 amino acids of SEQ ID NO: 340. Preferably, the first, second, third, fourth, fifth and/or sixth polypeptide contains 50 or fewer, 45 or fewer, 40 or fewer, 35 or fewer, 34 or fewer, 33 or fewer, 30 or fewer, or 25 or fewer amino acid residues.

[0037] In a 27th aspect, the invention provides an immunogenic composition comprising (i) a TLR agonist (ii) an insoluble metal salt and (iii) a polypeptide comprising amino acid sequence:

A-{-X-L-}ₙ-B

wherein: each X is an amino acid sequence of first amino acid sequence, second amino acid sequence, third amino acid sequence, fourth amino acid sequence, fifth amino acid sequence or sixth amino acid sequence as defined in the 26th aspect; L is an optional linker amino acid sequence; A is an optional N terminal amino acid sequence; B is an optional C terminal amino acid sequence; n is an integer of 2 or more. For instance, n can provide 2, 3, 4, 5 or 6 different amino acid sequences, and ideally comprising amino acid sequences from two or three different RrgB clades.

[0038] Immunogenic compositions of the 26th and/or 27th aspects preferably comprise two, three, four, five or six different amino acid sequences, more preferably from two or three different RrgB clades e.g. comprising at least one amino acid sequence selected from two or more of the following groups defined in the 26th aspect: (a) the first and second amino acid sequence; (b) the third and fourth amino acid sequence; and (c) the fifth and sixth amino acid sequence.

[0039] In an 28th aspect, the invention provides an immunogenic composition comprising: (i) an aluminium hydroxide adjuvant; (ii) a TLR7 agonist of formula (K); (iii) RrgB321; in which the TLR7 agonist and/or RrgB321 is/are adsorbed to the aluminium hydroxide adjuvant.

[0040] In a 29th aspect, the invention provides an immunogenic composition comprising: (a) an adjuvant complex comprising a first TLR agonist adsorbed to an insoluble metal salt; (b) an adjuvant complex comprising a second TLR agonist adsorbed to an insoluble metal salt; and (c) at least one S. pneumoniae protein antigen, wherein preferably, the protein antigen(s) are preferably adsorbed to the metal salt(s).

[0041] In a 30th aspect, the invention provides a process for preparing an immunogenic composition, wherein the process comprises mixing a TLR agonist, an insoluble metal salt, and S. pneumoniae protein antigen(s).

[0042] In a 31st aspect, the invention provides a process for preparing an immunogenic composition, comprising one of: (i) combining a S. pneumoniae protein antigen with a mixture comprising a TLR agonist and an insoluble metal salt; (ii) combining an insoluble metal salt with a mixture comprising a TLR agonist and a S. pneumoniae protein antigen; or (iii) combining a TLR agonist with a mixture comprising an insoluble metal salt and a S. pneumoniae protein antigen.

[0043] In a 32nd aspect, the invention provides a process for preparing an immunogenic composition, comprising steps of (i) preparing an aqueous mixture of a TLR agonist and a soluble aluminium salt; then (ii) adding a non-aluminium salt to the aqueous mixture in order to form a precipitated aluminium salt to which the TLR agonist is adsorbed; and (iii) adding S. pneumoniae protein antigen(s) in step (i), step (ii), and/or a third step. In one aspect, the invention provides an immunogenic composition obtained or obtainable by the method of the 32nd aspect.

[0044] In a 33rd aspect, the invention provides a process for preparing an immunogenic composition, comprising a step of mixing (i) an aqueous mixture of a TLR agonist and a soluble aluminium salt with (ii) a buffered aqueous mixture of a S. pneumoniae protein immunogen, wherein the mixing step causes precipitation of an aluminium salt to which the TLR agonist and the immunogen are adsorbed.

[0045] The invention also provides an immunogenic composition obtained or obtainable by the process of the 33rd aspect.

[0046] In a 34th aspect, the invention provides a process for preparing a sterile immunogenic composition, comprising steps of combining (i) a S. pneumoniae protein immunogen with (ii) a sterile complex of a TLR agonist and an insoluble metal salt. Preferably, the process comprises the steps of (a) mixing a TLR agonist and an insoluble metal salt such that the TLR agonist adsorbs to the insoluble metal salt to form the complex; and (b) sterilising the complex. As an alternative, the process comprises the steps of (a) sterilising a solution or suspension of a TLR agonist and (b) combining the sterilised solution or suspension with a sterile insoluble metal salt; or by (a) sterilising an insoluble metal salt and (b) combining the sterilised insoluble metal salt with a sterile solution or suspension of a TLR agonist; or by combining (a) a sterile solution or suspension of a TLR agonist with (b) a sterile insoluble metal salt. Sterilisation of the TLR agonist solution/suspension is preferably achieved by sterile filtration, and/or sterilisation of the insoluble metal salt is achieved by autoclaving.

[0047] In a 35th aspect, the invention provides a method of raising an immune response in a subject, comprising the step of administering to the subject the composition of any aspect. Preferably, the method comprises administering to the subject two or more doses of the composition of any aspect.

[0048] In some embodiments, the invention provides a method of raising an immune response in a subject, comprising administering to the subject two or more doses of the composition of any preceding aspect.

[0049] In some embodiments, the TLR agonist is an agonist of human TLR7. Preferably, the TLR agonist includes at least one adsorptive moiety which allows it to adsorb to insoluble metal salts; more preferably, the adsorptive moiety is a phosphate or a phosphonate.

[0050] In some embodiments the TLR agonist has formula (C), (D), (E), (F), (G), (H), (I), (II), (J) or (K) as defined in the description. In some embodiments, the TLR agonist is one of compounds 1 to 102 as defined in reference 2, or a pharmaceutically acceptable salt thereof. In some embodiments, the TLR agonist is compound K2, or a pharmaceutically acceptable salt thereof.

[0051] In some embodiments, the insoluble metal salt is an aluminium salt, preferably an aluminium hydroxide. In some embodiments, the aluminium salt has an Al⁺⁺⁻ concentration between 10-500 μg/ml.

[0052] In some embodiments, >80% of the TLR agonist is adsorbed to the insoluble metal salt.

[0053] In some embodiments, the one or more S. pneumoniae saccharide antigen(s) is selected from serotypes 1, 2, 3, 4, 5, 6A, 6B, 7F, 8, 9N, 9V, 10A, 11A, 12F, 14, 15B, 17F, 18C, 19A, 19F, 20, 22F, 23F, and/or 33F.

[0054] In some embodiments, the composition or process comprises a 5 valent combination of serotypes e.g. from serotypes 1, 5, 6B, 14, and 23F.

[0055] In some embodiments, the composition or process comprises a 7 valent combination of serotypes e.g. from serotypes 4, 6B, 9V, 14, 18C, 19F, and 23F.

[0056] In some embodiments, the composition or process comprises a 9 valent combination of serotypes e.g. from serotypes 1, 4, 5, 6B, 9V, 14, 18C, 19F and 23F.

[0057] In some embodiments, the composition or process comprises a 10 valent combination of serotypes e.g. from serotypes 1, 4, 5, 6B, 7F, 9V, 14, 18C, 19F and 23F.

[0058] In some embodiments, the composition or process comprises a combination of 11 serotypes.

[0059] In some embodiments, the composition or process comprises a 12 valent combination of serotypes, e.g. from serotypes 1, 4, 5, 6B, 7F, 9V, 14, 18C, 19F and 23F, preferably further comprising serotypes 6A and 19A; 6A and 22F; 19A and 22F; 6A and 15B; 19A and 15B; or 22F and 15B.

[0060] In some embodiments, the composition or process comprises a 13 valent combination e.g. from serotypes 1, 3, 4, 5, 6B, 7F, 9V, 14, 18C, 19F and 23F, in addition to serotypes 19A and 22F; 8 and 12F; 8 and 15B; 8 and 19A; 8 and 22F; 12F and 15B; 12F and 19A; 12F and 22F; 15B and 19A; 15B and 22F; or 6A and 19A. In some embodiments, the combination of 13 serotypes comprises serotypes 1, 3, 4, 5, 6A, 6B, 7F, 9V, 14, 18C, 19, 19F and 23F, or 1, 3, 4, 5, 6A, 6B, 7F, 9V, 14, 18C, 19A, 19F and 23F.

[0061] In some embodiments, the weight of each saccharide is 0.01-500 μg/ml for each serotype. In some embodiments, wherein there are saccharides from two or more serotypes, there is a 1:1 weight ratios of saccharides.

[0062] In some embodiments, the immunogenic composition comprises S. pneumoniae saccharide antigen from one serotype, preferably selected from serotypes 1, 2, 3, 4, 5, 6A, 6B, 7F, 8, 9N, 9V, 10A, 11A, 12F, 14, 15B, 17F, 18C, 19A, 19F, 20, 22F, 23F, and/or 33F, more preferably from serotype 1, 5, 6B, 14, or 23F.

[0063] In some embodiments, one or more S. pneumoniae saccharide antigen(s) is conjugated to a carrier protein. In some embodiments, the carrier protein is a bacterial toxin, toxoid, or mutant thereof, preferably selected from diphtheria, tetanus or Hinfluenzae, preferably diphtheria. A preferred carrier is CRM197, which is preferably at a concentration of 55-60μg/ml.

[0064] In some embodiments, there are S. pneumoniae saccharide antigens from two or more different serotypes, and the two or more saccharide antigens are conjugated to the same type of carrier protein. In other embodiments, there are S. pneumoniae saccharide antigens from two or more different serotypes, and the two or more saccharide antigens are conjugated different types of carrier protein.

[0065] In some embodiments, the carrier is conjugated directly to the saccharide, preferably by reductive amination between the saccharide and the carrier. In some embodiments, the carrier is conjugated to the saccharide via a linker, preferably an adipic acid linker, a carbonyl linker, a β-propionamido linker, nitrophenyl-ethylamine linker, haloacyl halide linker, glycosidic linker, 6-aminocaproic acid linker, ADH linker, or a C4 to C12 linker.

[0066] In some embodiments, the composition or process comprises a buffer, preferably a histidine buffer. Preferably, the histidine buffer is at a concentration of less than 50 mM histidine buffer.

[0067] In some embodiments, the composition or process has a pH between 6 and 8, preferably between pH 6 and 7.

[0068] In some embodiments, a composition or process which comprises a S. pneumoniae saccharide antigen further comprises a S. pneumoniae protein antigen. In some embodiments, a composition or process which comprises a S. pneumoniae protein antigen further comprises a S. pneumoniae saccharide antigen.

[0069] TLR Agonists

[0070] Compositions of the invention include a TLR agonist i.e. a compound which can agonise a Toll-like receptor. Most preferably, a TLR agonist is an agonist of a human TLR. The TLR agonist can activate any of TLR1, TLR2, TLR3, TLR4, TLR5, TLR6, TLR7, TLR8, TLR9 or TLR11; preferably it can activate human TLR7.

[0071] Agonist activity of a compound against any particular Toll-like receptor can be determined by standard assays. Companies such as Imgenex and Invivogen supply cell lines which are stably co-transfected with human TLR genes and NFKB, plus suitable reporter genes, for measuring TLR activation pathways. They are designed for sensitivity, broad working range dynamics and can be used for high-throughput screening. Constitutive expression of one or two specific TLRs is typical in such cell lines. See also reference 3. Many TLR agonists are known in the art e.g. reference 4 describes certain lipopeptide molecules that are TLR2 agonists, references 5 to 8 each describe classes of small molecule agonists of TLR7, and references 9 & 10 describe TLR7 and TLR8 agonists for treatment of diseases.

[0072] A TLR agonist used with the invention ideally includes at least one adsorptive moiety. The inclusion of such moieties in TLR agonists allows them to adsorb to insoluble metal salts (e.g. by ligand exchange or any other suitable mechanism) and improves their immunological behaviour (see reference 2). Phosphorus-containing adsorptive moieties are particularly useful, and so an adsorptive moiety may comprise a phosphate, a phosphonate, a phosphinate, a phosphonite, a phosphinite, etc.

[0073] Preferably the TLR agonist includes at least one phosphonate group.

[0074] Thus, in preferred embodiments, a composition of the invention includes a TLR7 agonist which includes a phosphonate group. This phosphonate group can allow adsorption of the agonist to an insoluble metal salt, such as to an aluminium salt.

[0075] TLR agonists useful with the invention may include a single adsorptive moiety, or may include more than one e.g. between 2 and 15 adsorptive moieties. Typically a compound will include 1, 2 or 3 adsorptive moieties.

[0076] Phosphorus-containing TLR agonists useful with the invention can be represented by fomula (A1):

[chemical structure]

[0077] wherein:
[0078] R^{X} and RY are independently selected from H and C₁-C₆ alkyl;
[0079] X is selected from a covalent bond, O and NH;
[0080] Y is selected from a covalent bond, O, C(O), S and NH;
[0081] L is a linker e.g. selected from, C₁-C₆alkylene, C₁-C₆alkenylene, arylene, heteroarylene, C₁-C₆alkyleneoxy and —((CH₂)ₚO)_{q}(CH₂)ₚ— each optionally substituted with 1 to 4 substituents independently selected from halo, OH, C₁-C₄alkyl, —OP(O)(OH)₂ and —P(O)(OH)₂;
[0082] each p is independently selected from 1, 2, 3, 4, 5 and 6;
[0083] q is selected from 1, 2, 3 and 4;
[0084] n is selected from 1, 2 and 3; and
[0085] A is a TLR agonist moiety.

[0086] In one embodiment, the TLR agonist according to formula (A1) is as follows: R^{X} and R^{Y} are H; X is O; L is selected from C₁-C₆ alkylene and —((CH₂)ₚO)_{q}(CH₂)ₚ— each optionally substituted with 1 to 2 halogen atoms; p is selected from 1, 2 and 3; q is selected from 1 and 2; and n is 1. Thus in these embodiments the adsorptive moiety comprises a phosphate group.

[0087] In other embodiments, the TLR agonist according to formula (A1) is as follows: R^{X} and R^{Y} are H; X is a covalent bond; L is selected from C₁-C₆ alkylene and —((CH₂)ₚO)_{q}(CH₂)ₚ— each optionally substituted with 1 to 2 halogen atoms; p is selected from 1, 2 or 3; q is selected from 1 or 2; and n is 1. Thus in these embodiments the adsorptive moiety comprises a phosphonate group.

[0088] Useful ‘A’ moieties for fomula (A1) include, but are not limited to, radicals of any of the following compounds, defined herein or as disclosed in references 4-10 and 213-231:

[chemical structure]

[chemical structure]

[0089] In some embodiments, the TLR agonist moiety ‘A’ has a molecular weight of less than 1000 Da. In some embodiments, the TLR agonist of fomula (A1) has a molecular weight of less than 1000 Da.

[0090] Preferred TLR agonists are water-soluble. Thus they can form a homogenous solution when mixed in an aqueous buffer with water at pH 7 at 25° C. and 1 atmosphere pressure to give a solution which has a concentration of at least 50 μg/ml. The term “water-soluble” thus excludes substances that are only sparingly soluble under these conditions.

[0091] Useful TLR agonists include those having formula (C), (D), (E), (F), (G), (H), (I), (II), (J) or (K) as described in more detail below. Other useful TLR agonists are compounds 1 to 102 as defined in reference 2. Preferred TLR7 agonists have formula (K), such as ‘K2’. These can be used as salts e.g. the arginine salt of K2.

[0092] Preferred TLR4 agonists are analogs of monophosphoryl lipid A (MPL). For instance, a useful TLR4 agonist is a 3d-MPL (i.e. 3-O-deacylated monophosphoryl lipid A; also known as 3-de-O-acylated monophosphoryl lipid A or 3-O-desacyl-4′-monophosphoryl lipid A). The name indicates that position 3 of the reducing end glucosamine in monophosphoryl lipid A is de-acylated. It has been prepared from a heptoseless mutant of Salmonella minnesota, and is chemically similar to lipid A but lacks an acid-labile phosphoryl group and a base-labile acyl group. It activates cells of the monocyte/macrophage lineage and stimulates release of several cytokines, including IL-1, IL-12, TNF-α and GM-CSF. Preparation of 3d-MPL was originally described in reference 11, and the product has been manufactured and sold by Corixa Corporation. It is present in the AS04 adjuvant used by GlaxoSmithKline. Further details can be found in references 12 to 15.

[0093] Typical compositions include 3d-MPL at a concentration of between 25 μg/ml and 200 μg/ml e.g. in the range 50-150 μg/ml, 75-125 μg/ml, 90-110 μg/ml, or about 100 μg/ml. It is usual to administer between 25-75 μg of 3d-MPL per dose e.g. between 45-55 μg, or about 50 μg 3d-MPL per dose.

[0094] 3d-MPL can take the form of a mixture of related molecules, varying by their acylation (e.g. having 3, 4, 5 or 6 acyl chains, which may be of different lengths). The two glucosamine (also known as 2-deoxy-2-amino-glucose) monosaccharides are N-acylated at their 2-position carbons (i.e. at positions 2 and 2′), and there is also O-acylation at the 3′ position. The group attached to carbon 2 has formula —NH—CO—CH₂—CR¹R^{1′}. The group attached to carbon 2′ has formula —NH—CO—CH₂—CR²R²′. The group attached to carbon 3′ has formula —O—CO—CH₂—CR³R^{3′}. A representative structure is:

[chemical structure]

Groups R¹, R² and R³ are each independently —(CH₂)ₙ—CH₃. The value of n is preferably between 8 and 16, more preferably between 9 and 12, and is most preferably 10.

[0095] Groups R^{1′}, R^{2′} and R^{3′} can each independently be: (a) —H; (b) —OH; or (c) —O—CO—R⁴,where R⁴ is either —H or —(CH₂)ₘ—CH₃, wherein the value of m is preferably between 8 and 16, and is more preferably 10, 12 or 14. At the 2 position, m is preferably 14. At the 2′ position, m is preferably 10.

[0096] At the 3′ position, m is preferably 12. Groups R^{1′}, R^{2′} and R^{3′} are thus preferably —O-acyl groups from dodecanoic acid, tetradecanoic acid or hexadecanoic acid.

[0097] When all of R^{1′}, R^{2′} and R^{3′} are H then the 3d-MPL has only 3 acyl chains (one on each of positions 2, 2′ and 3′). When only two of R^{1′}, R^{2′} and R^{3′} are H then the 3d-MPL can have 4 acyl chains. When only one of R^{1′}, R^{2′} and R^{3′} is H then the 3d-MPL can have 5 acyl chains. When none of R^{1′}, R^{2′} and R^{3′} is —H then the 3d-MPL can have 6 acyl chains. The 3d-MPL used according to the invention can be a mixture of these forms, with from 3 to 6 acyl chains, but it is preferred to include 3d-MPL with 6 acyl chains in the mixture, and in particular to ensure that the 6 acyl chain form makes up at least 10% by weight of the total 3d-MPL e.g. ≧20%, ≧30%, ≧40%, ≧50% or more. 3d-MPL with 6 acyl chains has been found to be the most adjuvant-active form.

[0098] Thus the most preferred form of 3d-MPL for use with the invention is:

[chemical structure]

[0099] Where 3d-MPL is used in the form of a mixture then references to amounts or concentrations of 3d-MPL in compositions of the invention refer to the combined 3d-MPL species in the mixture.

[0100] In aqueous conditions, 3d-MPL can form micellar aggregates or particles with different sizes e.g. with a diameter <150 nm or >500 nm. Either or both of these can be used with the invention, and the better particles can be selected by routine assay. Smaller particles (e.g. small enough to give a clear aqueous suspension of 3d-MPL) are preferred for use according to the invention because of their superior activity [16]. Preferred particles have a mean diameter less than 150 nm, more preferably less than 120 nm, and can even have a mean diameter less than 100 nm. In most cases, however, the mean diameter will not be lower than 50 nm. Where 3d-MPL is adsorbed to aluminum phosphate then it may not be possible to measure the 3D-MPL particle size directly, but particle size can be measured before adsorption takes place. Particle diameter can be assessed by the routine technique of dynamic light scattering, which reveals a mean particle diameter. Where a particle is said to have a diameter of x nm, there will generally be a distribution of particles about this mean, but at least 50% by number (e.g. ≧60%, ≧70%, ≧80%, ≧90%, or more) of the particles will have a diameter within the range x±25%.

[0101] A composition of the invention can include more than one TLR agonist. These two agonists are different from each other and they can target the same TLR or different TLRs. Both agonists can be adsorbed to a metal salt.

[0102] Insoluble Metal Salts

[0103] TLR agonists can adsorb to insoluble metal salts to form an adsorbed complex for adjuvanting S. pneumoniae antigens. For instance, they can be adsorbed to insoluble calcium salts (e.g. calcium phosphate) or, preferably, to insoluble aluminium salts. Such aluminium salts have a long history of use in vaccines.

[0104] Useful aluminium salts include, but are not limited to, aluminium hydroxide and aluminium phosphate adjuvants. Such salts are described e.g. in chapters 8 & 9 of reference 17. Aluminium salts which include hydroxide ions are the preferred insoluble metal salts for use with the present invention as these hydroxide ions can readily undergo ligand exchange. Thus preferred salts for adsorption of TLR agonists are aluminium hydroxide and/or aluminium hydroxyphosphate. These have surface hydroxyl moieties which can readily undergo ligand exchange with phosphorus-containing groups (e.g. phosphates, phosphonates) to provide stable adsorption.

[0105] The adjuvants commonly known as “aluminium hydroxide” are typically aluminium oxyhydroxide salts, which are usually at least partially crystalline. Aluminium oxyhydroxide, which can be represented by the formula AlO(OH), can be distinguished from other aluminium compounds, such as aluminium hydroxide Al(OH)₃, by infrared (IR) spectroscopy, in particular by the presence of an adsorption band at 1070 cm⁻¹ and a strong shoulder at 3090-3100 cm⁻¹ (chapter 9 of ref. 17). The degree of crystallinity of an aluminium hydroxide adjuvant is reflected by the width of the diffraction band at half height (WHH), with poorly-crystalline particles showing greater line broadening due to smaller crystallite sizes. The surface area increases as WHH increases, and adjuvants with higher WHH values have been seen to have greater capacity for antigen adsorption. A fibrous morphology (e.g. as seen in transmission electron micrographs) is typical for aluminium hydroxide adjuvants e.g. with needle-like particles with diameters about 2 nm. The pI of aluminium hydroxide adjuvants is typically about 11 i.e. the adjuvant itself has a positive surface charge at physiological pH. Adsorptive capacities of between 1.8-2.6 mg protein per mg Al⁺⁺⁺ at pH 7.4 have been reported for aluminium hydroxide adjuvants.

[0106] The adjuvants commonly known as “aluminium phosphate” are typically aluminium hydroxyphosphates, often also containing a small amount of sulfate (i.e. aluminium hydroxyphosphate sulfate). They may be obtained by precipitation, and the reaction conditions and concentrations during precipitation influence the degree of substitution of phosphate for hydroxyl in the salt. Hydroxyphosphates generally have a PO₄/Al molar ratio between 0.3 and 1.2. Hydroxyphosphates can be distinguished from strict AlPO₄ by the presence of hydroxyl groups. For example, an IR spectrum band at 3164 cm⁻¹ (e.g. when heated to 200° C.) indicates the presence of structural hydroxyls (chapter 9 of reference 17).

[0107] The PO₄/Al³⁺ molar ratio of an aluminium phosphate adjuvant will generally be between 0.3 and 1.2, preferably between 0.8 and 1.2, and more preferably 0.95±0.1. The aluminium phosphate will generally be amorphous, particularly for hydroxyphosphate salts. A typical adjuvant is amorphous aluminium hydroxyphosphate with PO₄/Al molar ratio between 0.84 and 0.92, included at 0.6 mg Al³⁺/ml. The aluminium phosphate will generally be particulate (e.g. plate-like morphology as seen in transmission electron micrographs, with primary particles in the range of 50 nm). Typical diameters of the particles are in the range 0.5-20 μm (e.g. about 5-10 μm) after any antigen adsorption. Adsorptive capacities of between 0.7-1.5 mg protein per mg Al⁺⁺⁺ at pH 7.4 have been reported for aluminium phosphate adjuvants.

[0108] The point of zero charge (PZC) of aluminium phosphate is inversely related to the degree of substitution of phosphate for hydroxyl, and this degree of substitution can vary depending on reaction conditions and concentration of reactants used for preparing the salt by precipitation. PZC is also altered by changing the concentration of free phosphate ions in solution (more phosphate=more acidic PZC) or by adding a buffer such as a histidine buffer (makes PZC more basic). Aluminium phosphates used according to the invention will generally have a PZC of between 4.0 and 7.0, more preferably between 5.0 and 6.5 e.g. about 5.7.

[0109] In solution both aluminium phosphate and hydroxide adjuvants tend to form stable porous aggregates 1-10 μm in diameter [18].

[0110] A composition including an TLR agonist of the invention adsorbed to a metal salt can also include a buffer (e.g. a phosphate or a histidine or a Tris buffer). When such a composition includes a phosphate buffer, however, it is preferred that the concentration of phosphate ions in the buffer should be less than 50 mM e.g. <40 mM, <30 mM, <20 mM, <10 mM, or <5 mM, or between 1-15 mM. A histidine buffer is preferred e.g. between 1-50 mM, between 5-25 mM, or about 10 mM.

[0111] Because of the insolubility of adsorptive metal salts which are useful with the invention, compositions containing adsorbed immunopotentiators will generally be suspensions having a cloudy appearance. This can mask contaminating bacterial growth and so a composition of the invention may include a preservative such as thiomersal or 2-phenoxyethanol. It is preferred that a composition should be substantially free from (e.g. <10 μg/ml) mercurial material e.g. thiomersal-free. Vaccines containing no mercury are more preferred.

[0112] A composition can include a mixture of both an aluminium oxyhydroxide and an aluminium hydroxyphosphate, and a TLR agonist may be adsorbed to one or both of these salts.

[0113] The concentration of Al^{30 ++} in a composition for administration to a patient is preferably less than 10 mg/ml e.g. ≦5 mg/ml, ≦4 mg/ml, ≦3 mg/ml, ≦2 mg/ml, ≦1 mg/ml, etc. A preferred range of Al⁺⁺⁺ in a composition of the invention is between 0.3 and 1 mg/ml or between 0.3-0.5 mg/ml. A maximum of 0.85 mg/dose is preferred. Because the inclusion of a TLR agonist can improve the adjuvant effect of aluminium salts then the invention advantageously permits lower amounts of Al⁺⁺⁺ per dose, and so a composition of the invention can usefully include between 10 and 250 μg of Al⁺⁺⁺ per unit dose. Current pediatric vaccines typically include at least 300 μg Al⁺⁺⁺. In concentration terms, a composition of the invention may have an Al′ concentration between 10 and 500 μg/ml e.g. between 10-300 μg/ml, between 10-200 μg/ml, or between 10-100 μg/ml.

[0114] In general, when a composition includes both a TLR agonist and an aluminium salt, the weight ratio of agonist to Al⁺⁺⁺ will be less than 5:1 e.g. less than 4:1, less than 3:1, less than 2:1, or less than 1:1. Thus, for example, with an Al⁺⁺⁺ concentration of 0.5 mg/ml the maximum concentration of TLR agonist would be 1.5mg/ml. But higher or lower levels can be used.

[0115] Where a composition includes a TLR agonist and an insoluble metal salt, it is preferred that at least 50% (by mass) of the agonist in the composition is adsorbed to the metal salt e.g. ≧60%, ≧70%, ≧80%, ≧85%, ≧90%, ≧92%, ≧94%, ≧95%, ≧96%, ≧97%, ≧98%, ≧99%, or even 100%.

[0116] S. pneumoniae Antigens

[0117] Both saccharide and polypeptide antigens are known for S. pneumoniae. In some compositions the S. pneumoniae antigen(s) is/are saccharide antigen(s); in some embodiments of such compositions, the composition does not include a S. pneumoniae protein antigen. In other compositions the S. pneumoniae antigen(s) is/are protein antigen(s); in some embodiments of such compositions, the composition does not include a S. pneumoniae saccharide antigen. In still other embodiments, compositions include both S. pneumoniae protein antigen(s) and S. pneumoniae saccharide antigen(s).

[0118] Saccharide Antigens

[0119] S. pneumoniae causes bacterial meningitis and existing vaccines are based on capsular saccharides. Thus compositions of the invention can include at least one pneumococcal capsular saccharide conjugated to a carrier protein.

[0120] The invention can include capsular saccharide from one or more different pneumococcal serotypes. Where a composition includes saccharide antigens from more than one serotype, these are preferably prepared separately, conjugated separately, and then combined. Methods for purifying pneumococcal capsular saccharides are known in the art (e.g. see reference 19) and vaccines based on purified saccharides from 23 different serotypes have been known for many years. Improvements to these methods have also been described e.g. for serotype 3 as described in reference 20, or for serotypes 1, 4, 5, 6A, 6B, 7F and 19A as described in reference 21.Approximately 91 serotypes of capsular pneumococci have been identified. Examples of saccharides from these serotypes are provided in references 22-24 and chapters 22 & 23 of ref. 25. Serotypes 1, 2, 3, 4, 5, 6A 6B, 7F, 8, 9N, 9V, 10A, 11A, 12F, 14, 15B, 17F, 18C, 19A, 19F, 20, 22F, 23F, and 33F, are thought to account for 85-90% of invasive pneumococcal disease. The repeating units for the main S. pneumoniae serotypes are described in FIG. 1 and refs 26 and 27. As discussed above, existing pneumococcal vaccines are known to induce anti-capsular antibodies to the specific pneumococcal serotype included in the formulation, and so compositions of the invention ideally include saccharides from one or more of these main S. pneumoniae serotypes.

[0121] The saccharide is from the capsular saccharide of a pneumococcus. The saccharide may be a polysaccharide having the size that arises during purification of the saccharide from bacteria, or it may be an oligosaccharide achieved by fragmentation of such a polysaccharide. In the 7-valent PREVNAR™ product for instance, 6 of the saccharides are presented as intact polysaccharides while one (the 18C serotype) is presented as an oligosaccharide.

[0122] A composition may include a capsular saccharide from one or more of the following pneumococcal serotypes: 1, 2, 3, 4, 5, 6A, 6B, 7F, 8, 9N, 9V, 10A, 11A, 12F, 14, 15B, 17F, 18C, 19A, 19F, 20, 22F, 23F and/or 33F. A composition may include multiple serotypes e.g. 2, 3, 4, 5, 6, 7, 8, 9, 10, 11, 12, 13, 14, 15, 16, 17, 18, 19, 20, 21, 22, 23, 24, 25, 26, 27, 28, 29, 30, 31, 32, 33, 34, 35, 36, 37, 38, 39, 40, or more serotypes. A composition may include 2-10 or at least 12 different serotypes e.g. 2, 3, 4, 5, 6, 7, 8, 9, 10, 12, 13, 14, 15, 16, 17, 18, 19, 20, 21, 22, 23, 24, 25, 26, 27, 28, 29, 30, 31, 32, 33, 34, 35, 36, 37, 38, 39, 40, or more serotypes.

[0123] Compositions which include 6B are useful. 7-valent, 9-valent, 10-valent, 11-valent and 13-valent conjugate combinations are already known in the art, as is a 23-valent unconjugated combination.

[0124] Preferably, saccharides from at least serotypes 6B, 14and 23F are used e.g. saccharides from serotypes 1, 5, 6B, 14, and 23F are used, or saccharides from serotypes 6B, 14, 19F and 23F are used. Further serotypes are preferably selected from one or more of serotypes 1, 3, 4, 5, 7F, 9V and 18C and/or serotypes 3, 6A and 19A. In some embodiments, 1 or more saccharides are omitted from these lists e.g. 1, 2, 3 etc. saccharides may be omitted.

[0125] A useful combination of serotypes is a 7 valent combination e.g. including capsular saccharide from each of serotypes 4, 6B, 9V, 14, 18C, 19F, and 23F. Another useful combination is a 9 valent combination e.g. including capsular saccharide from each of serotypes 1, 4, 5, 6B, 9V, 14, 18C, 19F and 23F. Another useful combination is a 10 valent combination e.g. including capsular saccharide from each of serotypes 1, 4, 5, 6B, 7F, 9V, 14, 18C, 19F and 23F. Another useful combination is a 10-valent combination may include saccharide from serotypes 1, 4, 5, 6B, 7F, 9V, 14, 18C, 19F and 23F. An 11-valent combination may further include saccharide from serotype 3. In some embodiments, there are not saccharides from 11 different serotypes. Where there are saccharides from 11 different serotypes, the saccharides are preferably not from serotypes 1, 3, 4, 5, 6B, 7F, 9V, 14, 18C, 19F and 23F.

[0126] A 12-valent combination may add to the 10-valent mixture: serotypes 6A and 19A; 6A and 22F; 19A and 22F; 6A and 15B; 19A and 15B;o r 22F and 15B; A 13-valent combination may add to the 11-valent mixture: serotypes 19A and 22F; 8 and 12F; 8 and 15B; 8 and 19A; 8 and 22F; 12F and 15B; 12F and 19A; 12F and 22F; 15B and 19A; 15B and 22F; 6A and 19A, etc. Thus, a useful 13-valent combination includes capsular saccharide from serotypes 1, 3, 4, 5, 6A, 6B, 7F, 9V, 14, 18C, 19 (or 19A), 19F and 23F e.g. prepared as disclosed in references 28 to 31. One such combination includes serotype 6B saccharide at about 8 μg/ml and the other 12 saccharides at concentrations of about 4 μg/ml each. Another such combination includes serotype 6A and 6B saccharides at about 8 μg/ml each and the other 11 saccharides at about 4 μg/ml each.

[0127] If saccharides are enclosed then it is preferred to include 1, 2 or 3 of serotypes 1, 5 and 14.

[0128] The composition optionally does not include diphtheria toxoid, tetanus toxoid and pertussis toxoid.

[0129] Suitable carrier proteins for conjugates include bacterial toxins, such as diphtheria or tetanus toxins, or toxoids or mutants thereof. These are commonly used in conjugate vaccines. For example, the CRM197 diphtheria toxin mutant is useful [32]. Other suitable carrier proteins include synthetic peptides [33,34], heat shock proteins [35,36], pertussis proteins [37,38], cytokines [39], lymphokines [39], hormones [39], growth factors [39], artificial proteins comprising multiple human CD4′ T cell epitopes from various pathogen-derived antigens [40] such as N19 [41], protein D from H.influenzae [42-44], pneumolysin [45] or its non-toxic derivatives [46], pneumococcal surface protein PspA [47], iron-uptake proteins [48], toxin A or B from C.difficile [49], recombinant Pseudomonas aeruginosa exoprotein A (rEPA) [50], etc.

[0130] Particularly useful carrier proteins for pneumococcal conjugate vaccines are CRM197, tetanus toxoid, diphtheria toxoid and H. influenzae protein D. CRM197 is used in PREVNAR™. A 13-valent mixture may use CRM197 as the carrier protein for each of the 13 conjugates, and CRM197 may be present at about 55-60μg/ml.

[0131] Where a composition includes conjugates from more than one pneumococcal serotype, it is possible to use the same carrier protein for each separate conjugate, or to use different carrier proteins. In both cases, though, a mixture of different conjugates will usually be formed by preparing each serotype conjugate separately, and then mixing them to form a mixture of separate conjugates. Reference 51 describes potential advantages when using different carrier proteins in multivalent pneumococcal conjugate vaccines, but the PREVNAR™ products successfully use the same carrier for each of seven different serotypes.

[0132] In some embodiments, a single conjugate may carry saccharides from multiple serotypes [52]. Usually, however, an individual conjugate will include saccharide from a single serotype.

[0133] Conjugates may have excess carrier (w/w) or excess saccharide (w/w). In some embodiments, a conjugate may include equal weights of each.

[0134] The carrier molecule may be covalently conjugated to the saccharide directly or via a linker. Various linkers are known. Direct linkages to the protein may be achieved by, for instance, reductive amination between the saccharide and the carrier, as described in, for example, references 53 and 54. The saccharide may first need to be activated e.g. by oxidation e.g. with periodate to introduce an aldehyde group, which can then form a direct covalent linkage to a carrier protein via reductive amination e.g. to the c amino group of a lysine. If the saccharide includes multiple aldehyde groups per molecule then this linkage technique can lead to a cross-linked product, where multiple aldehydes react with multiple carrier amines. This cross-linking conjugation technique is particularly useful for at least pneumococcal serotypes 4, 6B, 9V, 14, 18C, 19F and 23F. Linkages via a linker group may be made using any known procedure, for example, the procedures described in references 55 and 56. A preferred type of linkage is an adipic acid linker, which may be formed by coupling a free NH₂ group (e.g. introduced by amination) with adipic acid (using, for example, diimide activation), and then coupling a protein to the resulting saccharide-adipic acid intermediate [57,58]. Another preferred type of linkage is a carbonyl linker, which may be formed by reaction of a free hydroxyl group of a saccharide CDI [59, 60] followed by reaction with a protein to form a carbamate linkage. Other linkers include β-propionamido [61], nitrophenyl-ethylamine [62], haloacyl halides [63], glycosidic linkages [64], 6-aminocaproic acid [65], ADH [66], C₄ to C₁₂ moieties [67], etc. Carbodiimide condensation can also be used [68].

[0135] A pneumococcal saccharide may comprise a full length intact saccharide as prepared from pneumococcus, and/or may comprise fragments of full length saccharides i.e. the saccharides may be shorter than the native capsular saccharides seen in bacteria. The saccharides may thus be depolymerised, with depolymerisation occurring during or after saccharide purification but before conjugation. Depolymerisation reduces the chain length of the saccharides. Depolymerisation can be used in order to provide an optimum chain length for immunogenicity and/or to reduce chain length for physical manageability of the saccharides. Where more than one pneumococcal serotype is used then it is possible to use intact saccharides for each serotype, fragments for each serotype, or to use intact saccharides for some serotypes and fragments for other serotypes.

[0136] Where a composition includes saccharide from any of serotypes 4, 6B, 9V, 14, 19F and 23F, these saccharides are preferably intact. In contrast, where a composition includes saccharide from serotype 18C, this saccharide is preferably depolymerised.

[0137] A serotype 3 saccharide may also be depolymerised, For instance, a serotype 3 saccharide can be subjected to acid hydrolysis for depolymerisation [58] e.g. using acetic acid. The resulting fragments may then be oxidised for activation (e.g. periodate oxidation, maybe in the presence of bivalent cations e.g. with MgCl₂), conjugated to a carrier (e.g. CRM197) under reducing conditions (e.g. using sodium cyanoborohydride), and then (optionally) any unreacted aldehydes in the saccharide can be capped (e.g. using sodium borohydride) [58]. Conjugation may be performed on lyophilized material e.g. after co lyophilizing activated saccharide and carrier.

[0138] A serotype 1 saccharide may be at least partially de-O-acetylated e.g. achieved by alkaline pH buffer treatment [59] such as by using a bicarbonate/carbonate buffer. Such (partially) de O acetylated saccharides can be oxidised for activation (e.g. periodate oxidation), conjugated to a carrier (e.g. CRM197) under reducing conditions (e.g. using sodium cyanoborohydride), and then (optionally) any unreacted aldehydes in the saccharide can be capped (e.g. using sodium borohydride) [59]. Conjugation may be performed on lyophilized material e.g. after co lyophilizing activated saccharide and carrier.

[0139] A serotype 19A saccharide may be oxidised for activation (e.g. periodate oxidation), conjugated to a carrier (e.g. CRM197) in DMSO under reducing conditions, and then (optionally) any unreacted aldehydes in the saccharide can be capped (e.g. using sodium borohydride) [ ]. Conjugation may be performed on lyophilized material e.g. after co lyophilizing activated saccharide and carrier.

[0140] One or more pneumococcal capsular saccharide conjugates may be present in lyophilised form.

[0141] Pneumococcal conjugates can ideally elicit anticapsular antibodies that bind to the relevant saccharide e.g. elicit an anti-saccharide antibody level >0.20 μg/mL [ ]. The antibodies may be evaluated by enzyme immunoassay (EIA) and/or measurement of opsonophagocytic activity (OPA). The EIA method has been extensively validated and there is a link between antibody concentration and vaccine efficacy.

[0142] The concentration of a pneumococcal conjugate, measured as saccharide, is typically between 0.01 and 50 μg/ml for each serotype; preferably between 0.1 and 40 μg/ml; more preferably between 0.5 and 30 μg/ml; most preferably between 1 and 25 μg/ml, such as between 2 and 20 μg/ml for each serotype e.g. 2, 3, 4, 5, 6, 7, 8, 9, 10, 11, 12, 13, 14, 15, 16, 17, 18, 19 or 20 μg/ml for each serotype. In compositions comprising a mixture of saccharides from different serotypes, the amount of each saccharide in the mixture is typically approximately the same. As an alternative, a composition comprising a mixture of saccharides from different serotypes comprises different amounts of each saccharide e.g. a higher amount of saccharide(s) may be used if it is less immunogenic than other saccharides in the mixture.

[0143] Pneumococcal saccharide antigen(s) described herein may be combined with one or more pneumococcal protein antigens. Thus the invention provides an immunogenic composition comprising (i) a TLR agonist; (ii) an insoluble metal salt; (iii) one or more S. pneumoniae protein antigen(s), preferably as a mixture or hybrid; and (iv) one or more pneumococcal capsular saccharides described herein.

[0144] Pilus Antigens

[0145] When a composition includes one or more S. pneumoniae protein antigen(s), the preferred protein antigen(s) is/are a pilus antigen. Many strains of S. pneumoniae possess a pilus, encoded within a pathogenicity islet (rlrA). The islet encodes three surface proteins (RrgA, RrgB, and RrgC) and three sortase enzymes. In some embodiments of the invention, a composition will include, in addition to an antigen from one of the groups of the invention, one or more of: RrgA; RrgB; RrgC; SrtB; SrtC; and/or SrtD. Of these six proteins, including one or more of RrgA, RrgB and/or RrgC is preferred. RrgB is the most preferred pilus protein to be included.

[0146] Some strains possess a different pilus type [69], TI-2′. The PI-2 operon encodes PitA, SipA, PitB, SrtG1, and SrtG2. In some embodiments of the invention, a composition will include, in addition to an antigen from one of the groups of the invention, one or more of: PitA, SipA, PitB, SrtG1, and/or SrtG2.

[0147] RrgA is one of the surface subunits of the pneumococcal pilus [70,71] and is an important adhesin [72].There are at least two allelic forms of RrgA and, for reference purposes, their amino acid sequences are SEQ ID NOs: 172 and 179 herein. The two alleles are well conserved at their N- and C-termini but deviate in between.

[0148] Preferred RrgA polypeptides for use with the invention comprise an amino acid sequence: (a) having 50% or more identity (e.g. 60%, 65%, 70%, 75%, 80%, 85%, 90%, 91%, 92%, 93%, 94%, 95%, 96%, 97%, 98%, 99%, 99.5% or more) to SEQ ID NO: 172; and/or (b) comprising a fragment of at least ‘n’ consecutive amino acids of SEQ ID NO: 172, wherein ‘n’ is 7 or more (e.g. 8, 10, 12, 14, 16, 18, 20, 25, 30, 35, 40, 50, 60, 70, 80, 90, 100, 150, 200, 250 or more). These RrgA proteins include variants of SEQ ID NO: 172. Preferred fragments of (b) comprise an epitope from SEQ ID NO: 172. Other preferred fragments lack one or more amino acids (e.g. 1, 2, 3, 4, 5, 6, 7, 8, 9, 10, 15, 20, 25 or more) from the C-terminus and/or one or more amino acids (e.g. 1, 2, 3, 4, 5, 6, 7, 8, 9, 10, 15, 20, 25 or more) from the N-terminus of SEQ ID NO: 172 while retaining at least one epitope of SEQ ID NO: 172. Other fragments omit one or more protein domains. One suitable fragment is SEQ ID NO: 192, which omits the natural leader peptide and sortase recognition sequences.

[0149] Other preferred RrgA polypeptides for use with the invention comprise an amino acid sequence: (a) having 50% or more identity (e.g. 60%, 65%, 70%, 75%, 80%, 85%, 90%, 91%, 92%, 93%, 94%, 95%, 96%, 97%, 98%, 99%, 99.5% or more) to SEQ ID NO: 179; and/or (b) comprising a fragment of at least ‘n’ consecutive amino acids of SEQ ID NO: 179, wherein ‘n’ is 7 or more (e.g. 8, 10, 12, 14, 16, 18, 20, 25, 30, 35, 40, 50, 60, 70, 80, 90, 100, 150, 200, 250 or more). These RrgA proteins include variants of SEQ ID NO: 179. Preferred fragments of (b) comprise an epitope from SEQ ID NO: 179. Other preferred fragments lack one or more amino acids (e.g. 1, 2, 3, 4, 5, 6, 7, 8, 9, 10, 15, 20, 25 or more) from the C-terminus and/or one or more amino acids (e.g. 1, 2, 3, 4, 5, 6, 7, 8, 9, 10, 15, 20, 25 or more) from the N-terminus of SEQ ID NO: 179 while retaining at least one epitope of SEQ ID NO: 179. Other fragments omit one or more protein domains. One suitable fragment is SEQ ID NO: 191, which omits the natural leader peptide and sortase recognition sequences.

[0150] RrgB is one of the surface subunits of the pneumococcal pilus [70]. There are at least three allelic forms of RrgB and, for reference purposes, their amino acid sequences are SEQ ID NOs: 236, 237 and 238 herein. The three alleles are well conserved at their N- and C-termini but deviate in between.

[0151] Preferred RrgB polypeptides for use with the invention comprise an amino acid sequence: (a) having 50% or more identity (e.g. 60%, 65%, 70%, 75%, 80%, 85%, 90%, 91%, 92%, 93%, 94%, 95%, 96%, 97%, 98%, 99%, 99.5% or more) to SEQ ID NO: 236; and/or (b) comprising a fragment of at least ‘n’ consecutive amino acids of SEQ ID NO: 236, wherein ‘n’ is 7 or more (e.g. 8, 10, 12, 14, 16, 18, 20, 25, 30, 35, 40, 50, 60, 70, 80, 90, 100, 150, 200, 250 or more). These RrgB proteins include variants of SEQ ID NO: 236. Preferred fragments of (b) comprise an epitope from SEQ ID NO: 236. Other preferred fragments lack one or more amino acids (e.g. 1, 2, 3, 4, 5, 6, 7, 8, 9, 10, 15, 20, 25 or more) from the C-terminus and/or one or more amino acids (e.g. 1, 2, 3, 4, 5, 6, 7, 8, 9, 10, 15, 20, 25 or more) from the N-terminus of SEQ ID NO: 236 while retaining at least one epitope of SEQ ID NO: 236. Other fragments omit one or more protein domains.

[0152] Other preferred RrgB polypeptides for use with the invention comprise an amino acid sequence: (a) having 50% or more identity (e.g. 60%, 65%, 70%, 75%, 80%, 85%, 90%, 91%, 92%, 93%, 94%, 95%, 96%, 97%, 98%, 99%, 99.5% or more) to SEQ ID NO: 237; and/or (b) comprising a fragment of at least ‘n’ consecutive amino acids of SEQ ID NO: 237, wherein ‘n’ is 7 or more (e.g. 8, 10, 12, 14, 16, 18, 20, 25, 30, 35, 40, 50, 60, 70, 80, 90, 100, 150, 200, 250 or more). These RrgB proteins include variants of SEQ ID NO: 237. Preferred fragments of (b) comprise an epitope from SEQ ID NO: 237. Other preferred fragments lack one or more amino acids (e.g. 1, 2, 3, 4, 5, 6, 7, 8, 9, 10, 15, 20, 25 or more) from the C-terminus and/or one or more amino acids (e.g. 1, 2, 3, 4, 5, 6, 7, 8, 9, 10, 15, 20, 25 or more) from the N-terminus of SEQ ID NO: 237 while retaining at least one epitope of SEQ ID NO: 237. Other fragments omit one or more protein domains.

[0153] Other preferred RrgB polypeptides for use with the invention comprise an amino acid sequence: (a) having 50% or more identity (e.g. 60%, 65%, 70%, 75%, 80%, 85%, 90%, 91%, 92%, 93%, 94%, 95%, 96%, 97%, 98%, 99%, 99.5% or more) to SEQ ID NO: 238; and/or (b) comprising a fragment of at least ‘n’ consecutive amino acids of SEQ ID NO: 238, wherein ‘n’ is 7 or more (e.g. 8, 10, 12, 14, 16, 18, 20, 25, 30, 35, 40, 50, 60, 70, 80, 90, 100, 150, 200, 250 or more). These RrgB proteins include variants of SEQ ID NO: 238. Preferred fragments of (b) comprise an epitope from SEQ ID NO: 238. Other preferred fragments lack one or more amino acids (e.g. 1, 2, 3, 4, 5, 6, 7, 8, 9, 10, 15, 20, 25 or more) from the C-terminus and/or one or more amino acids (e.g. 1, 2, 3, 4, 5, 6, 7, 8, 9, 10, 15, 20, 25 or more) from the N-terminus of SEQ ID NO: 238 while retaining at least one epitope of SEQ ID NO: 238. Other fragments omit one or more protein domains.

[0154] RrgC is one of the surface subunits of the pneumococcal pilus [70]. For reference purposes, the amino acid sequence of RrgC is SEQ ID NO: 176 herein.

[0155] Preferred RrgC polypeptides for use with the invention comprise an amino acid sequence: (a) having 50% or more identity (e.g. 60%, 65%, 70%, 75%, 80%, 85%, 90%, 91%, 92%, 93%, 94%, 95%, 96%, 97%, 98%, 99%, 99.5% or more) to SEQ ID NO: 176; and/or (b) comprising a fragment of at least ‘n’ consecutive amino acids of SEQ ID NO: 176, wherein ‘n’ is 7 or more (e.g. 8, 10, 12, 14, 16, 18, 20, 25, 30, 35, 40, 50, 60, 70, 80, 90, 100, 150, 200, 250 or more). These RrgC proteins include variants of SEQ ID NO: 176. Preferred fragments of (b) comprise an epitope from SEQ ID NO: 176. Other preferred fragments lack one or more amino acids (e.g. 1, 2, 3, 4, 5, 6, 7, 8, 9, 10, 15, 20, 25 or more) from the C-terminus and/or one or more amino acids (e.g. 1, 2, 3, 4, 5, 6, 7, 8, 9, 10, 15, 20, 25 or more) from the N-terminus of SEQ ID NO: 176 while retaining at least one epitope of SEQ ID NO: 176. Other fragments omit one or more protein domains.

[0156] As discussed in reference 73, and below the RrgB protein has four domains, D1, D2, D3 and D4. Immunisation with full length RrgB or with separate domains of RrgB was shown in reference 236 to provide protection in active immunisation experiments. The D1 and D4 domains were shown to provide the most significant protective efficacy and the epitopes identified in these domains are expected to be involved in the protective mechanism.

[0157] The RrgB pilus subunit has at least three clades. Reference amino acid sequences for the three full length clades are SEQ ID NOs: 236, 237 and 238 herein. The clades are well conserved at their N- and C-termini but deviate in between. SEQ ID NOs: 236 and 237 are 46% identical; SEQ ID NOs: 236 and 238 are 51% identical; SEQ ID NOs: 237 and 238 are 65% identical. Epitopes have been identified at residue numbers 40 to 59 of the D1 domain and at residue numbers 494 to 508 of the D4 domain. The epitopes in each of the three clades are identified in the following table:

| Full Length | Epitope in | Epitope |
|---|---|---|
| Sequence (Clade) | D1 Domain | in D4 Domain |
| SEQ ID | HKLLATDGDMDKIANELETG | VTTKDALDRAVAAYN |
| NO.236 (I) | (SEQ ID NO: 335) | (SEQ ID NO: 336) |
| SEQ ID | VTKTLTIHKLLLSEDDLKTW | YTNAADKQAAQALVD |
| NO.237 (II) | (SEQ ID NO: 337) | (SEQ ID NO: 338) |
| SEQ ID | HKLLMTDQELDAWNSDAITT | KQALDAAIAAYTNAA |
| NO.238 (III) | (SEQ ID NO: 339) | (SEQ ID NO: 340) |

[0158] The identification of these epitopes allowed immunogenic compositions to be provided that do not contain the full length RrgB sequence, and instead contain fragments comprising the identified epitopes. These smaller fragments may be easier to produce and administer for therapeutic benefit, but retain the ability to generate an immune response against the full length RrgB protein.

[0159] Thus, a first aspect the invention provides an immunogenic composition comprising:
[0160] (a) a first amino acid sequence, where the first amino acid sequence comprises or consists of: SEQ ID NO.335, or an amino acid sequence having at least a⁶X9 sequence identity to SEQ ID NO: 335, or an amino acid sequence that competes with SEQ ID NO.335 for binding to an antibody raised against SEQ ID NO.335, or a fragment of at least u contiguous amino acids from SEQ ID NO.335; and/or
[0161] (b) a second amino acid sequence, where the second amino acid sequence comprises or consists of: SEQ ID NO.336, or an amino acid sequence having at least b⁶X9 sequence identity to SEQ ID NO: 336, or an amino acid sequence that competes with SEQ ID NO.336 for binding to an antibody raised against SEQ ID NO.336, or an a fragment of at least v contiguous amino acids from SEQ ID NO.336; and/or
[0162] (c) a third amino acid sequence, where the third amino acid sequence comprises or consists of: SEQ ID NO.337, or an amino acid sequence having at least c%^{,} sequence identity to SEQ ID NO: 337, or an amino acid sequence that competes with SEQ ID NO.337 for binding to an antibody raised against SEQ ID NO.337, or a fragment of at least w contiguous amino acids from SEQ ID NO.337; and/or
[0163] (d) a fourth amino acid sequence, where the fourth amino acid sequence comprises or consists of: SEQ ID NO.338, or an amino acid sequence having at least d%, sequence identity to SEQ ID NO: 338, or an amino acid sequence that competes with SEQ ID NO.338 for binding to an antibody raised against SEQ ID NO.338, or a fragment of at least x contiguous amino acids from SEQ ID NO.338; and/or
[0164] (e) a fifth amino acid sequence, where the fifth amino acid sequence comprises or consists of: SEQ ID NO.339, or an amino acid sequence having at least e%, sequence identity to SEQ ID NO: 339, or an amino acid sequence that competes with SEQ ID NO.339 for binding to an antibody raised against SEQ ID NO.339, or a fragment of at least y contiguous amino acids from SEQ ID NO.339; and/or
[0165] (f) a sixth amino acid sequence, where the sixth amino acid sequence comprises or consists of: SEQ ID NO.340, or an amino acid sequence having at least f% sequence identity to SEQ ID NO: 340, or an amino acid sequence that competes with SEQ ID NO.340 for binding to an antibody raised against SEQ ID NO.340, or a fragment of at least z contiguous amino acids from SEQ ID NO.340.

[0166] Serum raised against a given RrgB Glade is active against pneumococci which express that Glade, but is not active against strains which express one of the other two clades i.e. there is intra-clade cross-protection, but not inter-Glade cross-protection. According to one embodiment of the invention, therefore, an immunogenic composition includes epitopes from at least two different clades of RrgB. As detailed in the Table above, SEQ ID NOs. 335 and 336 are from a first Glade, SEQ ID NOs. 337 and 338 are from a second Glade and SEQ ID NOs. 339 and 340 are from a third Glade. An epitope identified above may be combined with an epitope, or a longer sequence containing multiple epitopes, from a different Glade. The different clades may be present in the immunogenic composition as separate polypeptides or may be fused as a single polypeptide chain. The inclusion of multiple RrgB clades as vaccine components improves the strain coverage of the immunogenic composition against pilus-containing pneumococci. Furthermore, it has been observed that there is a significant association between pilus-1 presence and antibiotic resistance; this observation suggests that immunising against pilus-1 using an immunogenic composition including multiple RrgB clades will have the additional advantage of protecting against pneumococci that are resistant to antibiotic treatment.

[0167] Thus the invention provides a polypeptide comprising a first, second, third, fourth, fifth and/or sixth amino acid sequence as defined above in the first aspect.

[0168] The invention also provides a polypeptide comprising amino acid sequence:

-A-{-X-L}ₙ-B-

wherein: X is an amino acid sequence of first amino acid sequence, second amino acid sequence, third amino acid sequence, fourth amino acid sequence, fifth amino acid sequence or sixth amino acid sequence as defined above; L is an optional linker amino acid sequence; A is an optional N-terminal amino acid sequence; B is an optional C-terminal amino acid sequence; n is an integer of 2 or more (e.g. 2, 3, 4, 5, 6, etc.). Optionally, the polypeptide comprises at least two of a first, second third, fourth, fifth and sixth amino acid sequence as defined above. Usually n is 2 or 3, and X moieties are selected from the following:

| N | X₁ | X₂ | X₃ |
|---|---|---|---|
| 2 | First or Second amino | Third or Fourth amino | — |
| | acid sequence | acid sequence | |
| 2 | Third or Fourth amino | First or Second amino | — |
| | acid sequence | acid sequence | |
| 3 | First or Second amino | Third or Fourth amino | Fifth or Sixth amino |
| | acid sequence | acid sequence | acid sequence |
| 3 | First or Second amino | Fifth or Sixth amino | Third or Fourth amino |
| | acid sequence | acid sequence | acid sequence |
| 3 | Third or Fourth amino | Fifth or Sixth amino | First or Second amino |
| | acid sequence | acid sequence | acid sequence |
| 3 | Third or Fourth amino | First or Second amino | Fifth or Sixth amino |
| | acid sequence | acid sequence | acid sequence |
| 3 | Fifth or Sixth amino | Third or Fourth amino | First or Second amino |
| | acid sequence | acid sequence | acid sequence |
| 3 | Fifth or Sixth amino | First or Second amino | Third or Fourth amino |
| | acid sequence | acid sequence | acid sequence |

[0169] In each of the combinations exemplified in the table above, the two alternatives for each instance of X_{1,} X₂ and X₃ can optionally be combined, so that both of the recited alternative amino acid sequences are administered. For example, in the first line of the Table, X₁ could contain the first and second amino acid sequence, and/or X₂ could contain the third and fourth amino acid sequence.

[0170] The invention also provides a cell (typically a bacterium, such as a pneumococcus) which expresses a first, second, third, fourth, fifth and/or sixth amino acid sequence as defined above in the first aspect.

[0171] The First, Second, Third, Fourth, Fifth and Sixth Amino Acid Sequences

[0172] The value of a is at least 75 e.g. 80, 85, 90, 92, 94, 95, 96, 97, 98, 99 or more. The value of b is at least 75 e.g. 80, 85, 90, 92, 94, 95, 96, 97, 98, 99 or more. The value of c is at least 75 e.g. 80, 85, 90, 92, 94, 95, 96, 97, 98, 99 or more. The value of d is at least 75 e.g. 80, 85, 90, 92, 94, 95, 96, 97, 98, 99 or more. The value of e is at least 75 e.g. 80, 85, 90, 92, 94, 95, 96, 97, 98, 99 or more. The value off is at least 75 e.g. 80, 85, 90, 92, 94, 95, 96, 97, 98, 99 or more. The values of a, b, c, d, e and f may be the same or different. In some embodiments, a, b, c, d, e andfare identical. Typically, a, b, c, d, e andfare at least 90 e.g. at least 95.

[0173] The value of tt is at least 7 e.g. 8, 9, 10, 11, 12, 13, 14, 15, 16, 17, 18, or 19. The value of v is at least 7 e.g. 8, 9, 10, 11, 12, 13 or 14. The value of w is at least 7 e.g. 8, 9, 10, 11, 12, 13, 14, 15, 16, 17, 18, or 19.The value of x is at least 7 e.g. 8, 9, 10, 11, 12, 13, or 14. The value of y is at least 7 e.g. 8, 9, 10, 11, 12, 13, 14, 15, 16, 17, 18, or 19. The value of z is at least 7 e.g. 8, 9, 10, 11, 12, 13, or 14. The values of u,v,w,x, y and z may be the same or different. In some embodiments, u,v,w,x, y and z are identical.

[0174] Fragments preferably comprise an epitope from the respective SEQ ID NO: sequence. Other useful fragments lack one or more amino acids (e.g. 1, 2, 3, 4, 5, 6, 7, 8, 9, 10, 15, or more) from the C-terminus and/or one or more amino acids (e.g. 1, 2, 3, 4, 5, 6, 7, 8, 9, 10, 15 or more) from the N-terminus of the respective SEQ ID NO: while retaining at least one epitope thereof. Truncation by 1-5 amino acids at the N-terminus is convenient e.g. removal of aa 1-5 of any of SEQ ID NOs: 335 to 340.

[0175] First, second, third, fourth, fifth and sixth polypeptides comprises or consists of the first, second, third, fourth, fifth and/or sixth amino acid sequences, respectively. These polypeptides can consist of, i.e. contain only, the respective amino acid sequence or can contain additional amino acid residues or sequences. Typically, each of the first, second, third, fourth, fifth and sixth polypeptides consists of 50 or fewer, 45 or fewer, 40 or fewer, 35 or fewer, 34 or fewer, 33 or fewer, 30 or fewer, or 25 or fewer amino acid residues.

[0176] The RrgB protein can be split into four domains (D1 to D4) between its leader peptide and its LPXTG anchor. These four domains are as follows in SEQ ID NOs: 236 to 238, and the positions in further RrgB sequences which correspond to these residues can readily be identified by alignment:

| | D1 | D2 | D3 | D4 |
|---|---|---|---|---|
| 1 | 31-184 | 185-326 | 327-446 | 447-627 |
| 2 | 31-185 | 186-318 | 319-434 | 435-606 |
| 3 | 31-184 | 185-319 | 320-445 | 446-616 |

[0177] Based on passive protection studies, useful fragments of RrgB may retain epitopes from at least domains D1 and/or D4. As shown in reference 236, antibodies have been raised that bind to domain D1, domain D4 and a fragment containing domains D2 to D4.

[0178] A polypeptide comprising the first or second amino acid sequence will, when administered to a subject, elicit an antibody response comprising antibodies that bind to the wild-type pneumococcus protein having amino acid sequence SEQ ID NO: 236 (strain TIGR4). In some embodiments these antibodies do not bind to the wild-type pneumococcus protein having amino acid sequence SEQ ID NO: 237 or to the wild-type pneumococcus protein having amino acid sequence SEQ ID NO: 238.

[0179] A polypeptide comprising the third or fourth amino acid sequence will, when administered to a subject, elicit an antibody response comprising antibodies that bind to the wild-type pneumococcus protein having amino acid sequence SEQ ID NO: 237 (strain Finland^{6B}-12). In some embodiments these antibodies do not bind to the wild-type pneumococcus protein having amino acid sequence SEQ ID NO: 236 or to the wild-type pneumococcus protein having amino acid sequence SEQ ID NO: 238.

[0180] A polypeptide comprising the fifth or sixth amino acid sequence will, when administered to a subject, elicit an antibody response comprising antibodies that bind to the wild-type pneumococcus protein having amino acid sequence SEQ ID NO: 238 (strain Taiwan^{23F}-15). In some embodiments these antibodies do not bind to the wild-type pneumococcus protein having amino acid sequence SEQ ID NO: 236 or to the wild-type pneumococcus protein having amino acid sequence SEQ ID NO: 237.

[0181] Although the first, third and fifth amino acid sequences may share some sequences in common, overall they have different amino acid sequences. Similarly, although the second, fourth and sixth amino acid sequences may share some sequences in common, overall they have different amino acid sequences.

[0182] Where the invention uses epitopes from only two RrgB clades a composition or polypeptide can include both: (a) a first or second amino acid sequence as defined above; and (b) a third or fourth amino acid sequence as defined above. In an alternative embodiment the composition includes both: (a) a first or second amino acid sequence as defined above; and (b) a fifth or sixth amino acid sequence as defined above. In an alternative embodiment the composition includes both: (a) a third or fourth amino acid sequence as defined above; and (b) a fifth or sixth amino acid sequence as defined above.

[0183] Amino acid sequences used with the invention, may, compared to SEQ ID NOs: 335, 336, 337, 338, 339 or 340 include one or more (e.g. 1, 2, 3, 4, 5, 6, 7, 8, 9, 10, etc.) conservative amino acid replacements i.e. replacements of one amino acid with another which has a related side chain. Genetically-encoded amino acids are generally divided into four families: (1) acidic i.e. aspartate, glutamate; (2) basic i.e. lysine, arginine, histidine; (3) non-polar i.e. alanine, valine, leucine, isoleucine, proline, phenylalanine, methionine, tryptophan; and (4) uncharged polar i.e. glycine, asparagine, glutamine, cysteine, serine, threonine, tyrosine. Phenylalanine, tryptophan, and tyrosine are sometimes classified jointly as aromatic amino acids. In general, substitution of single amino acids within these families does not have a major effect on the biological activity. The polypeptides may have one or more (e.g. 1, 2, 3, 4, 5, 6, 7, 8, 9, 10, etc.) single amino acid deletions relative to a reference sequence. The polypeptides may also include one or more (e.g. 1, 2, 3, 4, 5, 6, 7, 8, 9, 10, etc.) insertions (e.g. each of 1, 2, 3, 4 or 5 amino acids) relative to a reference sequence.

[0184] A polypeptide used with the invention may comprise an amino acid sequence that:
[0185] (a) is identical (i.e. 100% identical) to SEQ ID NO: 335, 336, 337, 338, 339 or 340;
[0186] (b) shares sequence identity SEQ ID NO: 335, 336, 337, 338, 339 or 340;
[0187] (c) has 1, 2, 3, 4, 5, 6, 7, 8, 9 or 10 (or more) single amino acid alterations (deletions, insertions, substitutions), which may be at separate locations or may be contiguous, as compared to the sequences of (a) or (b); and
[0188] (d) when aligned SEQ ID 335, 336, 337, 338, 339 or 340 using a pairwise alignment algorithm, each moving window of x amino acids from N-terminus to C-terminus (such that for an alignment that extends to p amino acids, where p>x, there are p-x+1 such windows) has at least xy identical aligned amino acids, where: x is selected from 20, 25, 30, 35, 40, 45, 50, 60, 70, 80, 90, 100, 150, 200; y is selected from 0.50, 0.60, 0.70, 0.75, 0.80, 0.85, 0.90, 0.91, 0.92, 0.93, 0.94, 0.95, 0.96, 0.97, 0.98, 0.99; and if xy is not an integer then it is rounded up to the nearest integer. The preferred pairwise alignment algorithm is the Needleman-Wunsch global alignment algorithm [74], using default parameters (e.g. with Gap opening penalty=10.0, and with Gap extension penalty=0.5, using the EBLOSUM62 scoring matrix). This algorithm is conveniently implemented in the needle tool in the EMBOSS package [75].

[0189] Within group (c), deletions or substitutions may be at the N-terminus and/or C-terminus, or may be between the two termini. Thus a truncation is an example of a deletion. Truncations may involve deletion of up to 5 (or more) amino acids at the N-terminus and/or C-terminus.

[0190] In general, when a polypeptide of the invention comprises a sequence that is not identical to a complete pneumococcal epitope sequence from SEQ ID NOs: 335, 336, 337, 338, 339 or 340 (e.g.

[0191] when it comprises a sequence listing with <100% sequence identity thereto, or when it comprises a fragment thereof), it is preferred in each individual instance that the polypeptide can elicit an antibody that recognises the complete pneumococcal sequence.

[0192] For reference, SEQ ID NOs: 236 to 238 and 320 to 331 are 15 unique RrgB sequences which have been identified in 45 different strains. Any of these sequences can be used for implementing the invention.

[0193] Other Pneumococcal Protein Antigens

[0194] Other S. pneumoniae antigens may be used with the invention, either as individual antigens, or in combinations e.g. in combination with RrgB antigen(s) described herein.

[0195] Preferred combinations of pneumococcal polypeptides have been identified. For example, a preferred combination of protein antigens is the following 7 pneumococcal polypeptides: spr0057; spr0286; spr0565; spr1098; spr1345; spr1416; spr1418. This set of antigens is referred to herein as ‘the first antigen group’. Thus the invention provides an immunogenic composition comprising a combination of S. pneumoniae antigens, said combination comprising two or more (i.e. 2, 3, 4, 5, 6 or all 7) antigens selected from the group consisting of: (1) a spr0057 antigen; (2) a spr0286 antigen; (3) a spr0565 antigen; (4) a spr1098 antigen; (5) a spr1345 antigen; (6) a spr1416 antigen; and/or (7) a spr1418 antigen.

[0196] Another preferred combination of protein antigens is the following 4 pneumococcal polypeptides: spr0867; spr1431; spr1739; spr2021. This set of antigens is referred to herein as ‘the second antigen group’. Thus the invention provides an immunogenic composition comprising a combination of S. pneumoniae antigens, said combination comprising two or more (i.e. 2, 3 or all 4) antigens selected from the group consisting of: (1) a spr0867 antigen; (2) a spr1431 antigen; (3) a spr1739 antigen; and/or (4) a spr2021 antigen.

[0197] Another preferred combination of protein antigens is the following 3 pneumococcal polypeptides: spr0096; spr1433; spr1707. This set of antigens is referred to herein as ‘the third antigen group’. Thus the invention provides an immunogenic composition comprising a combination of S. pneumoniae antigens, said combination comprising two or three antigens selected from the group consisting of: (1) a spr0096 antigen; (2) a spr1433 antigen; and/or (3) a spr1707 antigen.

[0198] The combination of 11 pneumococcal polypeptides in the first and second antigen groups is referred to herein as ‘the fourth antigen group’. Thus the invention provides an immunogenic composition comprising a combination of S. pneumoniae antigens, said combination comprising two or more (i.e. 2, 3, 4, 5, 6, 7, 8, 9, 10 or all 11) antigens selected from the group consisting of: (1) a spr0057 antigen; (2) a spr0286 antigen; (3) a spr0565 antigen; (4) a spr1098 antigen; (5) a spr1345 antigen;

[0199] (6) a spr1416 antigen; (7) a spr1418 antigen; (8) a spr0867 antigen; (9) a spr1431 antigen; (10) a spr1739 antigen; and/or (11) a spr2021 antigen.

[0200] The combination of 10 pneumococcal polypeptides in the first and third antigen groups is referred to herein as ‘the fifth antigen group’. Thus the invention provides an immunogenic composition comprising a combination of S. pneumoniae antigens, said combination comprising two or more (i.e. 2, 3, 4, 5, 6, 7, 8, 9, or all 10) antigens selected from the group consisting of: (1) a spr0057 antigen; (2) a spr0286 antigen; (3) a spr0565 antigen; (4) a spr1098 antigen; (5) a spr1345 antigen; (6) a spr1416 antigen; (7) a spr1418 antigen; (8) a spr0096 antigen; (9) a spr1433 antigen; and/or (10) a spr1707 antigen.

[0201] The combination of 7 pneumococcal polypeptides in the second and third antigen groups is referred to herein as ‘the sixth antigen group’. Thus the invention provides an immunogenic composition comprising a combination of S. pneumoniae antigens, said combination comprising two or more (i.e. 2, 3, 4, 5, 6, or all 7) antigens selected from the group consisting of: (1) a spr0867 antigen; (2) a spr1431 antigen; (3) a spr1739 antigen; (4) a spr2021 antigen; (5) a spr0096 antigen; (6) a spr1433 antigen; and/or (7) a spr1707 antigen.

[0202] The combination of 14 pneumococcal polypeptides in the first, second and third antigen groups is referred to herein as ‘the seventh antigen group’. Thus the invention provides an immunogenic composition comprising a combination of S. pneumoniae antigens, said combination comprising two or more (i.e. 2, 3, 4, 5, 6, 7, 8, 9, 10, 11, 12, 13, or all 14) antigens selected from the group consisting of: (1) a spr0057 antigen; (2) a spr0286 antigen; (3) a spr0565 antigen; (4) a spr1098 antigen; (5) a spr1345 antigen; (6) a spr1416 antigen; (7) a spr1418 antigen; (8) a spr0867 antigen; (9) a spr1431 antigen; (10) a spr1739 antigen; (11) a spr2021 antigen; (12) a spr0096 antigen; (13) a spr1433 antigen; and/or (14) a spr1707 antigen.

[0203] Within the seventh antigen group, a preferred subset of four antigens is the ‘eighth antigen group’, which includes an antigen from each of the first, second and third groups, namely spr0057, spr0096, spr0565 and spr2021. Thus the invention provides an immunogenic composition comprising a combination of S. pneumoniae antigens, said combination comprising two or more (i.e. 2, 3 or all 4) antigens selected from the group consisting of: (1) a spr0057 antigen; (2) a spr0096 antigen; (3) a spr0565 antigen; and/or (4) a spr2021 antigen. Within this eighth group, the composition may comprise: (1), (2) and (3); (1), (2) and (4); (1), (3) and (4); (2), (3) and (4); or (1), (2), (3) and (4). Expression of these four antigens has been immunologically confirmed across a panel of 32 pneumococcal strains with various serotypes.

[0204] The ‘ninth antigen group’ is the eighth antigen group plus a RrgB pilus antigen. Thus the invention also provides an immunogenic composition comprising a combination of S. pneumoniae antigens, said combination comprising one or more RrgB pilus antigen(s) and two or more (i.e. 2, 3 or all 4) antigens selected from the group consisting of: (1) a spr0057 antigen; (2) a spr0096 antigen; (3) a spr0565 antigen; and/or (4) a spr2021 antigen.

[0205] The ‘tenth antigen group’ is the eighth antigen group plus a Pmp polypeptide. Thus the invention also provides an immunogenic composition comprising a combination of S. pneumoniae antigens, said combination comprising two or more (i.e. 2, 3, 4 or all 5) antigens selected from the group consisting of: (1) a spr0057 antigen; (2) a spr0096 antigen; (3) a spr0565 antigen; (4) a spr2021 antigen; and/or (5) a Pmp polypeptide.

[0206] Specific combinations of interest comprise: (i) a spr0057 antigen and a spr0096 antigen; (ii) a spr0057 antigen and a spr2021 antigen; (iii) a spr0057 antigen, a spr0096 antigen and a spr2021 antigen; (iv) a spr0057 antigen and a spr0565 antigen; (v) a spr0565 antigen and a spr2021 antigen; (vi) a spr0057 antigen, a spr0565 antigen and a spr2021 antigen; (vii) a spr0565 antigen, a spr2021 antigen and a spr1739 antigen e.g. detoxified; and (viii) a spr0565 antigen, a spr2021 antigen and a Pmp polypeptide.

[0207] Advantageous combinations are those in which two or more antigens act synergistically. Thus the protection against pneumococcal disease achieved by their combined administration exceeds that expected by mere addition of their individual protective efficacy.

[0208] In additions to antigens from the various antigen groups, immunogenic compositions may include one or more of the following polypeptides to enhance the anti-pneumococcal immune response elicited by the composition:
[0209] One or more subunits of a pneumococcal pilus, such as RrgA, RrgB and/or RrgC.
[0210] A ClpP polypeptide.
[0211] A LytA polypeptide.
[0212] A CPL1 polypeptide.
[0213] A PhtA polypeptide.
[0214] A PhtB polypeptide.
[0215] A PhtD polypeptide.
[0216] A PhtE polypeptide.
[0217] A CbpD polypeptide
[0218] A CbpG polypeptide
[0219] A PvaA polypeptide.
[0220] A Hic polypeptide.
[0221] A Pmp polypeptide.
[0222] A ZmpB polypeptide.
[0223] A PspA polypeptide
[0224] A PsaA polypeptide
[0225] A PspC polypeptide.
[0226] A PrtA polypeptide.
[0227] A Sp91 polypeptide.
[0228] A Sp133 polypeptide.
[0229] A PiuA polypeptide and/or a PiaA polypeptide.
[0230] A spr0222 polypeptide.
[0231] An antigen selected from the group consisting of: IC1; IC2; IC3; IC4; IC5; IC6; IC7; IC8; IC9; IC10; IC11; IC12; IC13; IC14; IC15; IC16; IC17; IC18; IC19; IC20; IC21; IC22; IC23; IC24; IC25; IC26; IC27; IC28; IC29; IC30; IC31; IC32; IC33; IC34; IC35; IC36; IC37; IC38; IC39; IC40; IC41; IC42; IC43; IC44; IC45; IC46; IC47; IC48; IC49; IC50; IC51; IC52; IC53; IC54; IC55; IC56; IC57; IC58; IC59; IC60; IC61; IC62; IC63; IC64; IC65; IC66; IC67; IC68; IC69; IC70; IC71; IC72; IC73; IC74; IC75; IC76; IC77; IC78; IC79; IC80; IC81; IC82; IC83; IC84; IC85; IC86; IC88; IC89; IC90; IC91; IC92; IC93; IC94; IC95; IC96; IC97; IC98; IC99; IC100; IC 101; IC102; IC103; IC104; IC105; IC106; IC107; IC108; IC109; IC 110; IC111; IC112; IC113; IC114; IC115; IC116; IC117; IC118; IC119; IC120; IC121; IC122; IC123; IC124; IC125; IC126; IC127; IC128; IC129; IC130; and IC131.
[0232] An antigen selected from the group consisting of: ID-204, ID-212, ID-213, ID-214, ID-215, ID-216, ID-217, ID-219, ID-220, ID-225, ID-301, ID-302, ID-303, ID-304, ID-305, ID-306, as disclosed in reference 76.
[0233] An antigen selected from the group consisting of: SitlA, Sit1B, Sit1C, Sit2B, Sit2C, Sit2D, Sit3A, Sit3B, Sit3C, Sit3D, ORF1, ORF2, ORF3, ORF4, ORF5, ORF6, ORF6, ORF7, ORF8, ORF9, ORF10, ORF11, ORF12, ORF13, ORF14, MS1, MS2, MS3, MS4, MS5, MS6, MS7, MS8, MS9, MS10 or MS11, as disclosed in reference 77.
[0234] An antigen disclosed in reference 78.
[0235] An antigen disclosed in Tables 1-3 of reference 79, such as CbiO.
[0236] An antigen disclosed in reference 80, such as the 30S ribosomal protein S8.
[0237] An antigen selected from the group consisting of: a phosphoenolpyruvate protein phosphotransferase; a phosphomannomutase; a trigger factor; an elongation factor G; a tetracycline resistance protein (tet0); a DNA-directed RNA polymerase alpha-chain; a NADH oxidase; a glutamyl-tRNA amidotransferase subunit A; a N utilization substance protein A homolog; a Xaa-His dipeptidase; a cell division protein ftsz; a zinc metalloproteinase; a L-lactate dehydrogenase; a glyceraldehyde 3-phosphate dehydrogenase (GAPDH); a fructose-biphosphate aldolase; a UDP-glucose 4-epimerase; a GTP binding protein typA/BipA a GMP synthase; a glutamyl-tRNA synthetase; a NADP-specific glutamate dehydrogenase; an elongation factor TS; a phosphoglycerate kinase; a pyridine nucleotide-disulfide oxido-reductase; a 40S ribosomal protein Si; a 6-phosphogluconate dehydrogenase; an aminopeptidase C; a carbomyl-phosphate synthase (large subunit); a PTS system mannose-specific IIAB component; a ribosomal protein S2; a dihydroorotate dehydrogenase; an aspartate carbamoyltransferase; an elongation factor Tu; a pneumococcal surface immunogenic protein A (PsipA); a phosphogycerate kinase; an ABC transporter substrate-binding protein endopeptidase O; a pneumococcal surface immunogenic protein B (PsipB); or a pneumococcal surface immunogenic protein C (PsipC) [81].

[0238] IC1 to IC131

[0239] In some embodiments a composition will include one or more antigens selected from the group consisting of IC1 to IC131, e.g. in addition to an antigen from one of the antigen groups above. These 131 polypeptides (see below) are disclosed in reference 82, being the 144 polypeptides of Table 3 therein except for those listed as SP0117, SP0641, SP0664, SP1003, SP1004, SP1174, SP1175, SP1573, SP1687, SP1693, SP1937 and SP2190. Within the 132 polypeptides IC1 to IC131, a preferred subset from which the one or more polypeptide(s) may be selected is: IC1; IC8; IC16; IC23; IC31; IC34; IC40; IC45; IC47; IC57; IC58; IC60; and IC69.

[0240] spr0057

[0241] The original ‘spr0057’ sequence was annotated in reference 205 as ‘Beta-N-acetyl-hexosaminidase precursor’ (see GI:15902101). For reference purposes, the amino acid sequence of full length spr0057 as found in the R6 strain is given as SEQ ID NO: 1 herein.

[0242] Preferred spr0057 polypeptides for use with the invention comprise an amino acid sequence: (a) having 50% or more identity (e.g. 60%, 65%, 70%, 75%, 80%, 85%, 90%, 91%, 92%, 93%, 94%, 95%, 96%, 97%, 98%, 99%, 99.5% or more) to SEQ ID NO: 1; and/or (b) comprising a fragment of at least ‘n’ consecutive amino acids of SEQ ID NO: 1, wherein ‘n’ is 7 or more (e.g. 8, 10, 12, 14, 16, 18, 20, 25, 30, 35, 40, 50, 60, 70, 80, 90, 100, 150, 200, 250 or more). These spr0057 proteins include variants of SEQ ID NO: 1. Preferred fragments of (b) comprise an epitope from SEQ ID NO: 1. Other preferred fragments lack one or more amino acids (e.g. 1, 2, 3, 4, 5, 6, 7, 8, 9, 10, 15, 20, 25 or more) from the C-terminus and/or one or more amino acids (e.g. 1, 2, 3, 4, 5, 6, 7, 8, 9, 10, 15, 20, 25 or more) from the N-terminus of SEQ ID NO: 1 while retaining at least one epitope of SEQ ID NO: 1. Other fragments omit one or more protein domains. One suitable fragment is SEQ ID NO: 180, which omits the natural leader peptide and sortase recognition sequences.

[0243] Combinations of spr0057 with other pneumococcal antigens have shown good synergistic effects.

[0244] spr0286

[0245] The original ‘spr0286’ sequence was annotated in reference 205 as ‘Hyaluronate lyase precursor’ (see GI:15902330). For reference purposes, the amino acid sequence of full length spr0286 as found in the R6 strain is given as SEQ ID NO: 2 herein.

[0246] Preferred spr0286 polypeptides for use with the invention comprise an amino acid sequence: (a) having 50% or more identity (e.g. 60%, 65%, 70%, 75%, 80%, 85%, 90%, 91%, 92%, 93%, 94%, 95%, 96%, 97%, 98%, 99%, 99.5% or more) to SEQ ID NO: 2; and/or (b) comprising a fragment of at least ‘n’ consecutive amino acids of SEQ ID NO: 2, wherein ‘n’ is 7 or more (e.g. 8, 10, 12, 14, 16, 18, 20, 25, 30, 35, 40, 50, 60, 70, 80, 90, 100, 150, 200, 250 or more). These spr0286 proteins include variants of SEQ ID NO: 2. Preferred fragments of (b) comprise an epitope from SEQ ID NO:

[0247] 2. Other preferred fragments lack one or more amino acids (e.g. 1, 2, 3, 4, 5, 6, 7, 8, 9, 10, 15, 20, 25 or more) from the C-terminus and/or one or more amino acids (e.g. 1, 2, 3, 4, 5, 6, 7, 8, 9, 10, 15, 20, 25 or more) from the N-terminus of SEQ ID NO: 2 while retaining at least one epitope of SEQ ID NO: 2. Other fragments omit one or more protein domains. One suitable fragment is SEQ ID NO: 181, which omits the natural leader peptide and sortase recognition sequences. Other suitable fragments are SEQ ID NOs: 182 and 183.

[0248] spr0565

[0249] The original ‘spr0565’ sequence was annotated in reference 205 as ‘beta-galactosidase precursor’ (see GI:15902609). For reference purposes, the amino acid sequence of full length spr0565 as found in the R6 strain is given as SEQ ID NO: 3 herein.

[0250] Preferred spr0565 polypeptides for use with the invention comprise an amino acid sequence: (a) having 50% or more identity (e.g. 60%, 65%, 70%, 75%, 80%, 85%, 90%, 91%, 92%, 93%, 94%, 95%, 96%, 97%, 98%, 99%, 99.5% or more) to SEQ ID NO: 3; and/or (b) comprising a fragment of at least ‘n’ consecutive amino acids of SEQ ID NO: 3, wherein ‘n’ is 7 or more (e.g. 8, 10, 12, 14, 16, 18, 20, 25, 30, 35, 40, 50, 60, 70, 80, 90, 100, 150, 200, 250 or more). These spr0565 proteins include variants of SEQ ID NO: 3 (e.g. SEQ ID NO: 66; see below). Preferred fragments of (b) comprise an epitope from SEQ ID NO: 3. Other preferred fragments lack one or more amino acids (e.g. 1, 2, 3, 4, 5, 6, 7, 8, 9, 10, 15, 20, 25 or more) from the C-terminus and/or one or more amino acids (e.g. 1, 2, 3, 4, 5, 6, 7, 8, 9, 10, 15, 20, 25 or more) from the N-terminus of SEQ ID NO: 3 while retaining at least one epitope of SEQ ID NO: 3. Other fragments omit one or more protein domains. One suitable fragment is SEQ ID NO: 184, which omits the natural leader peptide and sortase recognition sequences. Other suitable fragments are SEQ ID NOs: 177 and 178.

[0251] A variant form of spr0565 is SEQ ID NO: 66 herein. The use of this variant form for immunisation is reported in reference 82 (SEQ ID NO: 178 therein). Useful spr0565 polypeptides may comprise an amino acid sequence: (a) having 50% or more identity (e.g. 60%, 65%, 70%, 75%, 80%, 85%, 90%, 91%, 92%, 93%, 94%, 95%, 96%, 97%, 98%, 99%, 99.5% or more) to SEQ ID NO: 66; and/or (b) comprising a fragment of at least ‘n’ consecutive amino acids of SEQ ID NO: 66, wherein ‘n’ is 7 or more (e.g. 8, 10, 12, 14, 16, 18, 20, 25, 30, 35, 40, 50, 60, 70, 80, 90, 100, 150, 200, 250 or more).

[0252] These polypeptides include variants of SEQ ID NO: 66. Preferred fragments of (b) comprise an epitope from SEQ ID NO: 66. Other preferred fragments lack one or more amino acids (e.g. 1, 2, 3, 4, 5, 6, 7, 8, 9, 10, 15, 20, 25 or more) from the C-terminus and/or one or more amino acids (e.g. 1, 2, 3, 4, 5, 6, 7, 8, 9, 10, 15, 20, 25 or more) from the N-terminus of SEQ ID NO: 66 while retaining at least one epitope of SEQ ID NO: 66. Other fragments omit one or more protein domains.

[0253] Immunogenic fragments of SEQ ID NO: 66 are identified in table 1 of reference 82.

[0254] Because spr0565 is naturally a long polypeptide (>2000 aa) it can be more convenient to express fragments. Thus a suitable form of spr0565 for use with the invention may be less than 1500 amino acids long (e.g. <1400, <1300, <1200, <1100, etc.). Such short forms of spr0565 include ‘spr0565A’ (SEQ ID NO: 177) and ‘spr0565B’ (SEQ ID NO: 178).

[0255] Combinations of spr0565 with other pneumococcal antigens have shown good synergistic effects.

[0256] spr1 098

[0257] The original ‘spr1098’ sequence was annotated in reference 205 as ‘Sortase’ (see GI:15903141). For reference purposes, the amino acid sequence of full length spr1098 as found in the R6 strain is given as SEQ ID NO: 4 herein.

[0258] Preferred spr1098 polypeptides for use with the invention comprise an amino acid sequence: (a) having 50% or more identity (e.g. 60%, 65%, 70%, 75%, 80%, 85%, 90%, 91%, 92%, 93%, 94%, 95%, 96%, 97%, 98%, 99%, 99.5% or more) to SEQ ID NO: 4; and/or (b) comprising a fragment of at least ‘n’ consecutive amino acids of SEQ ID NO: 4, wherein ‘n’ is 7 or more (e.g. 8, 10, 12, 14, 16, 18, 20, 25, 30, 35, 40, 50, 60, 70, 80, 90, 100, 150, 200, 250 or more). These spr1098 proteins include variants of SEQ ID NO: 4. Preferred fragments of (b) comprise an epitope from SEQ ID NO: 4. Other preferred fragments lack one or more amino acids (e.g. 1, 2, 3, 4, 5, 6, 7, 8, 9, 10, 15, 20, 25 or more) from the C-terminus and/or one or more amino acids (e.g. 1, 2, 3, 4, 5, 6, 7, 8, 9, 10, 15, 20, 25 or more) from the N-terminus of SEQ ID NO: 4 while retaining at least one epitope of SEQ ID NO: 4. Other fragments omit one or more protein domains. One suitable fragment is SEQ ID NO: 187, which omits the natural leader peptide sequence.

[0259] spr 1 345

[0260] The original ‘spr1345’ sequence was annotated in reference 205 as ‘hypothetical protein’ (see GI:15903388). For reference purposes, the amino acid sequence of full length spr1345 as found in the R6 strain is given as SEQ ID NO: 5 herein.

[0261] Preferred spr1345 polypeptides for use with the invention comprise an amino acid sequence: (a) having 50% or more identity (e.g. 60%, 65%, 70%, 75%, 80%, 85%, 90%, 91%, 92%, 93%, 94%, 95%, 96%, 97%, 98%, 99%, 99.5% or more) to SEQ ID NO: 5; and/or (b) comprising a fragment of at least ‘n’ consecutive amino acids of SEQ ID NO: 5, wherein ‘n’ is 7 or more (e.g. 8, 10, 12, 14, 16, 18, 20, 25, 30, 35, 40, 50, 60, 70, 80, 90, 100, 150, 200, 250 or more). These spr1345 proteins include variants of SEQ ID NO: 5. Preferred fragments of (b) comprise an epitope from SEQ ID NO: 5. Other preferred fragments lack one or more amino acids (e.g. 1, 2, 3, 4, 5, 6, 7, 8, 9, 10, 15, 20, 25 or more) from the C-terminus and/or one or more amino acids (e.g. 1, 2, 3, 4, 5, 6, 7, 8, 9, 10, 15, 20, 25 or more) from the N-terminus of SEQ ID NO: 5 while retaining at least one epitope of SEQ ID NO: 5. Other fragments omit one or more protein domains. One suitable fragment is SEQ ID NO: 188, which omits the natural leader peptide and sortase recognition sequences.

[0262] spr1416

[0263] The original ‘spr1416’ sequence was annotated in reference 205 as ‘hypothetical protein’ (see GI:15903459). For reference purposes, the amino acid sequence of full length spr1416 as found in the R6 strain is given as SEQ ID NO: 6 herein.

[0264] Preferred spr1416 polypeptides for use with the invention comprise an amino acid sequence: (a) having 50% or more identity (e.g. 60%, 65%, 70%, 75%, 80%, 85%, 90%, 91%, 92%, 93%, 94%, 95%, 96%, 97%, 98%, 99%, 99.5% or more) to SEQ ID NO: 6; and/or (b) comprising a fragment of at least ‘n’ consecutive amino acids of SEQ ID NO: 6, wherein ‘n’ is 7 or more (e.g. 8, 10, 12, 14, 16, 18, 20, 25, 30, 35, 40, 50, 60, 70, 80, 90, 100, 150, 200, 250 or more). These spr1416 proteins include variants of SEQ ID NO: 6. Preferred fragments of (b) comprise an epitope from SEQ ID NO: 6. Other preferred fragments lack one or more amino acids (e.g. 1, 2, 3, 4, 5, 6, 7, 8, 9, 10, 15, 20, 25 or more) from the C-terminus and/or one or more amino acids (e.g. 1, 2, 3, 4, 5, 6, 7, 8, 9, 10, 15, 20, 25 or more) from the N-terminus of SEQ ID NO: 6 while retaining at least one epitope of SEQ ID NO: 6. Other fragments omit one or more protein domains.

[0265] spr1418

[0266] The original ‘spr1418’ sequence was annotated in reference 205 as ‘hypothetical protein’ (see GI:15903461). For reference purposes, the amino acid sequence of full length spr1418 as found in the R6 strain is given as SEQ ID NO: 7 herein.

[0267] Preferred spr1418 polypeptides for use with the invention comprise an amino acid sequence: (a) having 50% or more identity (e.g. 60%, 65%, 70%, 75%, 80%, 85%, 90%, 91%, 92%, 93%, 94%, 95%, 96%, 97%, 98%, 99%, 99.5% or more) to SEQ ID NO: 7; and/or (b) comprising a fragment of at least ‘n’ consecutive amino acids of SEQ ID NO: 7, wherein ‘n’ is 7 or more (e.g. 8, 10, 12, 14, 16, 18, 20, 25, 30, 35, 40, 50, 60, 70, 80, 90, 100, 150, 200, 250 or more). These spr1418 proteins include variants of SEQ ID NO: 7. Preferred fragments of (b) comprise an epitope from SEQ ID NO: 7. Other preferred fragments lack one or more amino acids (e.g. 1, 2, 3, 4, 5, 6, 7, 8, 9, 10, 15, 20, 25 or more) from the C-terminus and/or one or more amino acids (e.g. 1, 2, 3, 4, 5, 6, 7, 8, 9, 10, 15, 20, 25 or more) from the N-terminus of SEQ ID NO: 7 while retaining at least one epitope of SEQ ID NO: 7. Other fragments omit one or more protein domains.

[0268] spr0867

[0269] The original ‘spr0867’ sequence was annotated in reference 205 as ‘Endo-beta-N-acetylglucosaminidase’ (see GI:15902911). For reference purposes, the amino acid sequence of full length spr0867 as found in the R6 strain is given as SEQ ID NO: 8 herein.

[0270] Preferred spr0867 polypeptides for use with the invention comprise an amino acid sequence: (a) having 50% or more identity (e.g. 60%, 65%, 70%, 75%, 80%, 85%, 90%, 91%, 92%, 93%, 94%, 95%, 96%, 97%, 98%, 99%, 99.5% or more) to SEQ ID NO: 8; and/or (b) comprising a fragment of at least ‘n’ consecutive amino acids of SEQ ID NO: 8, wherein ‘n’ is 7 or more (e.g. 8, 10, 12, 14, 16, 18, 20, 25, 30, 35, 40, 50, 60, 70, 80, 90, 100, 150, 200, 250 or more). These spr0867 proteins include variants of SEQ ID NO: 8. Preferred fragments of (b) comprise an epitope from SEQ ID NO: 8. Other preferred fragments lack one or more amino acids (e.g. 1, 2, 3, 4, 5, 6, 7, 8, 9, 10, 15, 20, 25 or more) from the C-terminus and/or one or more amino acids (e.g. 1, 2, 3, 4, 5, 6, 7, 8, 9, 10, 15, 20, 25 or more) from the N-terminus of SEQ ID NO: 8 while retaining at least one epitope of SEQ ID NO: 8. Other fragments omit one or more protein domains. One suitable fragment is SEQ ID NO: 185, which omits the natural leader peptide sequence.

[0271] spr1431

[0272] The original ‘spr1431’ sequence was annotated in reference 205 as ‘1,4-beta-N-acetylmuramidase’ (see GI:15903474). It is also known as ‘LytC’, and its use for immunisation is reported in reference 103. For reference purposes, the amino acid sequence of full length spr1431 as found in the R6 strain is given as SEQ ID NO: 9 herein.

[0273] Preferred spr1431 polypeptides for use with the invention comprise an amino acid sequence: (a) having 50% or more identity (e.g. 60%, 65%, 70%, 75%, 80%, 85%, 90%, 91%, 92%, 93%, 94%, 95%, 96%, 97%, 98%, 99%, 99.5% or more) to SEQ ID NO: 9; and/or (b) comprising a fragment of at least ‘n’ consecutive amino acids of SEQ ID NO: 9, wherein ‘n’ is 7 or more (e.g. 8, 10, 12, 14, 16, 18, 20, 25, 30, 35, 40, 50, 60, 70, 80, 90, 100, 150, 200, 250 or more). These spr1431 proteins include variants of SEQ ID NO: 9. Preferred fragments of (b) comprise an epitope from SEQ ID NO: 9. Other preferred fragments lack one or more amino acids (e.g. 1, 2, 3, 4, 5, 6, 7, 8, 9, 10, 15, 20, 25 or more) from the C-terminus and/or one or more amino acids (e.g. 1, 2, 3, 4, 5, 6, 7, 8, 9, 10, 15, 20, 25 or more) from the N-terminus of SEQ ID NO: 9 while retaining at least one epitope of SEQ ID NO: 9. Other fragments omit one or more protein domains. One suitable fragment is SEQ ID NO: 189, which omits the natural leader peptide sequence.

[0274] spr 1 739

[0275] The ‘spr1739’ polypeptide is pneumolysin (e.g. see GI:15903781). For reference purposes, the amino acid sequence of full length spr1739 as found in the R6 strain is given as SEQ ID NO: 10 herein.

[0276] Preferred spr1739 polypeptides for use with the invention comprise an amino acid sequence: (a) having 50% or more identity (e.g. 60%, 65%, 70%, 75%, 80%, 85%, 90%, 91%, 92%, 93%, 94%, 95%, 96%, 97%, 98%, 99%, 99.5% or more) to SEQ ID NO: 10; and/or (b) comprising a fragment of at least ‘n’ consecutive amino acids of SEQ ID NO: 10, wherein ‘n’ is 7 or more (e.g. 8, 10, 12, 14, 16, 18, 20, 25, 30, 35, 40, 50, 60, 70, 80, 90, 100, 150, 200, 250 or more). These spr1739 proteins include variants of SEQ ID NO: 10. Preferred fragments of (b) comprise an epitope from SEQ ID NO: 10. Other preferred fragments lack one or more amino acids (e.g. 1, 2, 3, 4, 5, 6, 7, 8, 9, 10, 15, 20, 25 or more) from the C-terminus and/or one or more amino acids (e.g. 1, 2, 3, 4, 5, 6, 7, 8, 9, 10, 15, 20, 25 or more) from the N-terminus of SEQ ID NO: 10 while retaining at least one epitope of SEQ ID NO: 10. Other fragments omit one or more protein domains.

[0277] Mutant forms of pneumolysin for vaccination use are known in the art [123, 83-88], and these mutant forms may be used with the invention. Detoxification can be achieved by C-terminal truncation (e.g. see ref. 89) e.g. deleting 34 amino acids, 45 amino acids, 7 amino acids [90], etc. Further mutations, numbered according to SEQ ID NO: 20, include Pro325-*Leu (e.g. SEQ ID NO: 169) and/or Trp433-*Phe (e.g. SEQ ID NO: 171). These mutations may be combined with C-terminal truncations e.g. to combine a Pro325-*Leu mutation with a 7-mer truncation (e.g. SEQ ID NO: 170).

[0278] spr2021

[0279] The original ‘spr2021’ sequence was annotated in reference 205 as ‘General stress protein GSP-781’ (see GI:15904062). For reference purposes, the amino acid sequence of full length spr2021 as found in the R6 strain is given as SEQ ID NO: 11 herein.

[0280] Preferred spr2021 polypeptides for use with the invention comprise an amino acid sequence: (a) having 50% or more identity (e.g. 60%, 65%, 70%, 75%, 80%, 85%, 90%, 91%, 92%, 93%, 94%, 95%, 96%, 97%, 98%, 99%, 99.5% or more) to SEQ ID NO: 11; and/or (b) comprising a fragment of at least ‘n’ consecutive amino acids of SEQ ID NO: 11, wherein ‘n’ is 7 or more (e.g. 8, 10, 12, 14, 16, 18, 20, 25, 30, 35, 40, 50, 60, 70, 80, 90, 100, 150, 200, 250 or more). These spr2021 proteins include variants of SEQ ID NO: 11. Preferred fragments of (b) comprise an epitope from SEQ ID NO: 11. Other preferred fragments lack one or more amino acids (e.g. 1, 2, 3, 4, 5, 6, 7, 8, 9, 10, 15, 20, 25 or more) from the C-terminus and/or one or more amino acids (e.g. 1, 2, 3, 4, 5, 6, 7, 8, 9, 10, 15, 20, 25 or more) from the N-terminus of SEQ ID NO: 11 while retaining at least one epitope of SEQ ID NO: 11. Other fragments omit one or more protein domains. One suitable fragment is SEQ ID NO: 190, which omits the natural leader peptide sequence.

[0281] Combinations of spr2021 with other pneumococcal antigens have shown good synergistic effects.

[0282] Reference 82 annotates spr2021 as a secreted 45 kDa protein with homology to GbpB and discloses its use as an immunogen (SEQ ID NO: 243 therein; SP2216). Immunogenic fragments of spr2021 are identified in table 1 of reference 82 (page 73). Another useful fragment of spr2021 is disclosed as SEQ ID NO: 1 of reference 91 (amino acids 28-278 of SEQ ID NO: 11 herein).

[0283] spr0096

[0284] The original ‘spr0096’ sequence was annotated in reference 205 as ‘hypothetical protein’ (see GI:15902140). For reference purposes, the amino acid sequence of full length spr0096 as found in the R6 strain is given as SEQ ID NO: 12 herein.

[0285] Preferred spr0096 polypeptides for use with the invention comprise an amino acid sequence: (a) having 50% or more identity (e.g. 60%, 65%, 70%, 75%, 80%, 85%, 90%, 91%, 92%, 93%, 94%, 95%, 96%, 97%, 98%, 99%, 99.5% or more) to SEQ ID NO: 12; and/or (b) comprising a fragment of at least ‘n’ consecutive amino acids of SEQ ID NO: 12, wherein ‘n’ is 7 or more (e.g. 8, 10, 12, 14, 16, 18, 20, 25, 30, 35, 40, 50, 60, 70, 80, 90, 100, 150, 200, 250 or more). These spr0096 proteins include variants of SEQ ID NO: 12 (e.g. SEQ ID NO: 40; see below). Preferred fragments of (b) comprise an epitope from SEQ ID NO: 12. Other preferred fragments lack one or more amino acids (e.g. 1, 2, 3, 4, 5, 6, 7, 8, 9, 10, 15, 20, 25 or more) from the C-terminus and/or one or more amino acids (e.g. 1, 2, 3, 4, 5, 6, 7, 8, 9, 10, 15, 20, 25 or more) from the N-terminus of SEQ ID NO: 12 while retaining at least one epitope of SEQ ID NO: 12. Other fragments omit one or more protein domains.

[0286] Combinations of spr0096 with other pneumococcal antigens have shown good synergistic effects.

[0287] A variant form of spr0096, with an insert near its C-terminus relative to SEQ ID NO: 12, is SEQ ID NO: 40 herein. The use of this variant for immunisation is reported in reference 82 (SEQ ID NO: 150 therein), where it is annotated as a LysM domain protein. Thus a spr0096 for use with the invention may comprise an amino acid sequence: (a) having 50% or more identity (e.g. 60%, 65%, 70%, 75%, 80%, 85%, 90%, 91%, 92%, 93%, 94%, 95%, 96%, 97%, 98%, 99%, 99.5% or more) to SEQ ID NO: 40; and/or (b) comprising a fragment of at least ‘n’ consecutive amino acids of SEQ ID NO: 40, wherein ‘n’ is 7 or more (e.g. 8, 10, 12, 14, 16, 18, 20, 25, 30, 35, 40, 50, 60, 70, 80, 90, 100, 150, 200, 250 or more). These polypeptides include variants of SEQ ID NO: 40. Preferred fragments of (b) comprise an epitope from SEQ ID NO: 40. Other preferred fragments lack one or more amino acids (e.g. 1, 2, 3, 4, 5, 6, 7, 8, 9, 10, 15, 20, 25 or more) from the C-terminus and/or one or more amino acids (e.g. 1, 2, 3, 4, 5, 6, 7, 8, 9, 10, 15, 20, 25 or more) from the N-terminus of SEQ ID NO: 40 while retaining at least one epitope of SEQ ID NO: 40. Other fragments omit one or more protein domains. Immunogenic fragments of SEQID NO: 40 are identified in table 1 of reference 82.

[0288] A spr0096 polypeptide may be used in the form of a dimer e.g. a homodimer.

[0289] spr 1433

[0290] The original ‘spr1433’ sequence was annotated in reference 205 as ‘hypothetical protein’ (see GI:15903476). For reference purposes, the amino acid sequence of full length spr1433 as found in the R6 strain is given as SEQ ID NO: 13 herein.

[0291] Preferred spr1433 polypeptides for use with the invention comprise an amino acid sequence: (a) having 50% or more identity (e.g. 60%, 65%, 70%, 75%, 80%, 85%, 90%, 91%, 92%, 93%, 94%, 95%, 96%, 97%, 98%, 99%, 99.5% or more) to SEQ ID NO: 13; and/or (b) comprising a fragment of at least ‘n’ consecutive amino acids of SEQ ID NO: 13, wherein ‘n’ is 7 or more (e.g. 8, 10, 12, 14, 16, 18, 20, 25, 30, 35, 40, 50, 60, 70, 80, 90, 100, 150, 200, 250 or more). These spr1433 proteins include variants of SEQ ID NO: 13. Preferred fragments of (b) comprise an epitope from SEQ ID NO: 13. Other preferred fragments lack one or more amino acids (e.g. 1, 2, 3, 4, 5, 6, 7, 8, 9, 10, 15, 20, 25 or more) from the C-terminus and/or one or more amino acids (e.g. 1, 2, 3, 4, 5, 6, 7, 8, 9, 10, 15, 20, 25 or more) from the N-terminus of SEQ ID NO: 13 while retaining at least one epitope of SEQ ID NO: 13. Other fragments omit one or more protein domains.

[0292] spr 1 707

[0293] The original ‘spr1707’ sequence was annotated in reference 205 as ‘ABC transporter substrate-binding protein—oligopeptide transport’ (see GI:15903749). For reference purposes, the amino acid sequence of full length spr1707 as found in the R6 strain is given as SEQ ID NO: 14 herein.

[0294] Preferred spr1707 polypeptides for use with the invention comprise an amino acid sequence: (a) having 50% or more identity (e.g. 60%, 65%, 70%, 75%, 80%, 85%, 90%, 91%, 92%, 93%, 94%, 95%, 96%, 97%, 98%, 99%, 99.5% or more) to SEQ ID NO: 14; and/or (b) comprising a fragment of at least ‘n’ consecutive amino acids of SEQ ID NO: 14, wherein ‘n’ is 7 or more (e.g. 8, 10, 12, 14, 16, 18, 20, 25, 30, 35, 40, 50, 60, 70, 80, 90, 100, 150, 200, 250 or more). These spr1707 proteins include variants of SEQ ID NO: 14 (e.g. SEQ ID NO: 100; see below). Preferred fragments of (b) comprise an epitope from SEQ ID NO: 14. Other preferred fragments lack one or more amino acids (e.g. 1, 2, 3, 4, 5, 6, 7, 8, 9, 10, 15, 20, 25 or more) from the C-terminus and/or one or more amino acids (e.g. 1, 2, 3, 4, 5, 6, 7, 8, 9, 10, 15, 20, 25 or more) from the N-terminus of SEQ ID NO: 14 while retaining at least one epitope of SEQ ID NO: 14. Other fragments omit one or more protein domains.

[0295] A variant form of spr1707, differing from SEQ ID NO: 14 by 4 amino acids, is SEQ ID NO: 100 herein. The use of SEQ ID NO: 100 for immunisation is reported in reference 82 (SEQ ID NO: 220 therein). Thus a spr1707 polypeptide for use with the invention may comprise an amino acid sequence: (a) having 50% or more identity (e.g. 60%, 65%, 70%, 75%, 80%, 85%, 90%, 91%, 92%, 93%, 94%, 95%, 96%, 97%, 98%, 99%, 99.5% or more) to SEQ ID NO: 100; and/or (b) comprising a fragment of at least ‘n’ consecutive amino acids of SEQ ID NO: 100, wherein ‘n’ is 7 or more (e.g. 8, 10, 12, 14, 16, 18, 20, 25, 30, 35, 40, 50, 60, 70, 80, 90, 100, 150, 200, 250 or more). These polypeptides include variants of SEQ ID NO: 100. Preferred fragments of (b) comprise an epitope from SEQ ID NO: 100. Other preferred fragments lack one or more amino acids (e.g. 1, 2, 3, 4, 5, 6, 7, 8, 9, 10, 15, 20, 25 or more) from the C-terminus and/or one or more amino acids (e.g. 1, 2, 3, 4, 5, 6, 7, 8, 9, 10, 15, 20, 25 or more) from the N-terminus of SEQ ID NO: 100 while retaining at least one epitope of SEQ ID NO: 100. Other fragments omit one or more protein domains.

[0296] Immunogenic fragments of SEQ ID NO: 100 are identified in table 1 of reference 82.

[0297] ClpP

[0298] ClpP is the ATP-dependent Clp protease proteolytic subunit. For reference purposes, the amino acid sequence of full length ClpP is SEQ ID NO: 16 herein. In the R6 genome ClpP is spr0656 [205].

[0299] Preferred ClpP polypeptides for use with the invention comprise an amino acid sequence: (a) having 50% or more identity (e.g. 60%, 65%, 70%, 75%, 80%, 85%, 90%, 91%, 92%, 93%, 94%, 95%, 96%, 97%, 98%, 99%, 99.5% or more) to SEQ ID NO: 16; and/or (b) comprising a fragment of at least ‘n’ consecutive amino acids of SEQ ID NO: 16, wherein ‘n’ is 7 or more (e.g. 8, 10, 12, 14, 16, 18, 20, 25, 30, 35, 40, 50, 60, 70, 80, 90, 100, 150, 200, 250 or more). These ClpP proteins include variants of SEQ ID NO: 16. Preferred fragments of (b) comprise an epitope from SEQ ID NO: 16. Other preferred fragments lack one or more amino acids (e.g. 1, 2, 3, 4, 5, 6, 7, 8, 9, 10, 15, 20, 25 or more) from the C-terminus and/or one or more amino acids (e.g. 1, 2, 3, 4, 5, 6, 7, 8, 9, 10, 15, 20, 25 or more) from the N-terminus of SEQ ID NO: 16 while retaining at least one epitope of SEQ ID NO: 16. Other fragments omit one or more protein domains.

[0300] The use of ClpP for immunisation is reported in references 92 and 93. It may advantageously be used in combination with PspA and PsaA and/or PspC [92].

[0301] LytA

[0302] LytA is the N-acetylmuramoyl-L-alanine amidase (autolysin). For reference purposes, the amino acid sequence of full length LytA is SEQ ID NO: 17 herein. In the R6 genome LytA is spr1754 [205].

[0303] Preferred LytA polypeptides for use with the invention comprise an amino acid sequence: (a) having 50% or more identity (e.g. 60%, 65%, 70%, 75%, 80%, 85%, 90%, 91%, 92%, 93%, 94%, 95%, 96%, 97%, 98%, 99%, 99.5% or more) to SEQ ID NO: 17; and/or (b) comprising a fragment of at least ‘n’ consecutive amino acids of SEQ ID NO: 17, wherein ‘n’ is 7 or more (e.g. 8, 10, 12, 14, 16, 18, 20, 25, 30, 35, 40, 50, 60, 70, 80, 90, 100, 150, 200, 250 or more). These LytA proteins include variants of SEQ ID NO: 17 (e.g. GI:18568354). Preferred fragments of (b) comprise an epitope from SEQ ID NO: 17. Other preferred fragments lack one or more amino acids (e.g. 1, 2, 3, 4, 5, 6, 7, 8, 9, 10, 15, 20, 25 or more) from the C-terminus and/or one or more amino acids (e.g. 1, 2, 3, 4, 5, 6, 7, 8, 9, 10, 15, 20, 25 or more) from the N-terminus of SEQ ID NO: 17 while retaining at least one epitope of SEQ ID NO: 17. Other fragments omit one or more protein domains.

[0304] The use of LytA for immunisation is reported in reference 94, particularly in a form comprising the LytA choline binding domain fused to a heterologous promiscuous T helper epitope.

[0305] PhtA

[0306] PhtA is the Pneumococcal histidine triad protein A. For reference purposes, the amino acid sequence of full length PhtA precursor is SEQ ID NO: 18 herein. In the R6 genome PhtA is spr1061 [205].

[0307] Preferred PhtA polypeptides for use with the invention comprise an amino acid sequence: (a) having 50% or more identity (e.g. 60%, 65%, 70%, 75%, 80%, 85%, 90%, 91%, 92%, 93%, 94%, 95%, 96%, 97%, 98%, 99%, 99.5% or more) to SEQ ID NO: 18; and/or (b) comprising a fragment of at least ‘n’ consecutive amino acids of SEQ ID NO: 18, wherein ‘n’ is 7 or more (e.g. 8, 10, 12, 14, 16, 18, 20, 25, 30, 35, 40, 50, 60, 70, 80, 90, 100, 150, 200, 250 or more). These PhtA proteins include variants of SEQ ID NO: 18. Preferred fragments of (b) comprise an epitope from SEQ ID NO: 18. Other preferred fragments lack one or more amino acids (e.g. 1, 2, 3, 4, 5, 6, 7, 8, 9, 10, 15, 20, 25 or more) from the C-terminus and/or one or more amino acids (e.g. 1, 2, 3, 4, 5, 6, 7, 8, 9, 10, 15, 20, 25 or more) from the N-terminus of SEQ ID NO: 18 while retaining at least one epitope of SEQ ID NO: 18. Other fragments omit one or more protein domains.

[0308] The use of PhtA for immunisation is reported in references 95 and 96.

[0309] PhtB

[0310] PhtB is the pneumococcal histidine triad protein B. For reference purposes, the amino acid sequence of full length PhtB precursor is SEQ ID NO: 19 herein. Xaa at residue 578 can be Lysine.

[0311] Preferred PhtB polypeptides for use with the invention comprise an amino acid sequence: (a) having 50% or more identity (e.g. 60%, 65%, 70%, 75%, 80%, 85%, 90%, 91%, 92%, 93%, 94%, 95%, 96%, 97%, 98%, 99%, 99.5% or more) to SEQ ID NO: 19; and/or (b) comprising a fragment of at least ‘n’ consecutive amino acids of SEQ ID NO: 19, wherein ‘n’ is 7 or more (e.g. 8, 10, 12, 14, 16, 18, 20, 25, 30, 35, 40, 50, 60, 70, 80, 90, 100, 150, 200, 250 or more). These PhtB proteins include variants of SEQ ID NO: 19. Preferred fragments of (b) comprise an epitope from SEQ ID NO: 19. Other preferred fragments lack one or more amino acids (e.g. 1, 2, 3, 4, 5, 6, 7, 8, 9, 10, 15, 20, 25 or more) from the C-terminus and/or one or more amino acids (e.g. 1, 2, 3, 4, 5, 6, 7, 8, 9, 10, 15, 20, 25 or more) from the N-terminus of SEQ ID NO: 19 while retaining at least one epitope of SEQ ID NO: 19. Other fragments omit one or more protein domains.

[0312] The use of PhtB for immunisation is reported in references 97 and 98.

[0313] PhtD

[0314] PhtD is the Pneumococcal histidine triad protein D. For reference purposes, the amino acid sequence of full length PhtD precursor is SEQ ID NO: 20 herein. In the R6 genome PhtD is spr0907 [205].

[0315] Preferred PhtD polypeptides for use with the invention comprise an amino acid sequence: (a) having 50% or more identity (e.g. 60%, 65%, 70%, 75%, 80%, 85%, 90%, 91%, 92%, 93%, 94%, 95%, 96%, 97%, 98%, 99%, 99.5% or more) to SEQ ID NO: 20; and/or (b) comprising a fragment of at least ‘n’ consecutive amino acids of SEQ ID NO: 20, wherein ‘n’ is 7 or more (e.g. 8, 10, 12, 14, 16, 18, 20, 25, 30, 35, 40, 50, 60, 70, 80, 90, 100, 150, 200, 250 or more). These PhtD proteins include variants of SEQ ID NO: 20. Preferred fragments of (b) comprise an epitope from SEQ ID NO: 20. Other preferred fragments lack one or more amino acids (e.g. 1, 2, 3, 4, 5, 6, 7, 8, 9, 10, 15, 20, 25 or more) from the C-terminus and/or one or more amino acids (e.g. 1, 2, 3, 4, 5, 6, 7, 8, 9, 10, 15, 20, 25 or more) from the N-terminus of SEQ ID NO: 20 while retaining at least one epitope of SEQ ID NO: 20. Other fragments omit one or more protein domains.

[0316] The use of PhtD for immunisation is reported in references 95, 96 and 99.

[0317] PhtE

[0318] PhtE is the Pneumococcal histidine triad protein E. For reference purposes, the amino acid sequence of full length PhtE precursor is SEQ ID NO: 21 herein. In the R6 genome PhtE is spr0908 [205].

[0319] Preferred PhtE polypeptides for use with the invention comprise an amino acid sequence: (a) having 50% or more identity (e.g. 60%, 65%, 70%, 75%, 80%, 85%, 90%, 91%, 92%, 93%, 94%, 95%, 96%, 97%, 98%, 99%, 99.5% or more) to SEQ ID NO: 21; and/or (b) comprising a fragment of at least ‘n’ consecutive amino acids of SEQ ID NO: 21, wherein ‘n’ is 7 or more (e.g. 8, 10, 12, 14, 16, 18, 20, 25, 30, 35, 40, 50, 60, 70, 80, 90, 100, 150, 200, 250 or more). These PhtE proteins include variants of SEQ ID NO: 21. Preferred fragments of (b) comprise an epitope from SEQ ID NO: 21. Other preferred fragments lack one or more amino acids (e.g. 1, 2, 3, 4, 5, 6, 7, 8, 9, 10, 15, 20, 25 or more) from the C-terminus and/or one or more amino acids (e.g. 1, 2, 3, 4, 5, 6, 7, 8, 9, 10, 15, 20, 25 or more) from the N-terminus of SEQ ID NO: 21 while retaining at least one epitope of SEQ ID NO: 21. Other fragments omit one or more protein domains.

[0320] The use of PhtE for immunisation is reported in references 95 and 96.

[0321] ZmpB

[0322] ZmpB is the zinc metalloprotease. For reference purposes, the amino acid sequence of full length ZmpB is SEQ ID NO: 22 herein. In the R6 genome ZmpB is spr0581 [205].

[0323] Preferred ZmpB polypeptides for use with the invention comprise an amino acid sequence: (a) having 50% or more identity (e.g. 60%, 65%, 70%, 75%, 80%, 85%, 90%, 91%, 92%, 93%, 94%, 95%, 96%, 97%, 98%, 99%, 99.5% or more) to SEQ ID NO: 22; and/or (b) comprising a fragment of at least ‘n’ consecutive amino acids of SEQ ID NO: 22, wherein ‘n’ is 7 or more (e.g. 8, 10, 12, 14, 16, 18, 20, 25, 30, 35, 40, 50, 60, 70, 80, 90, 100, 150, 200, 250 or more). These ZmpB proteins include variants of SEQ ID NO: 22. Preferred fragments of (b) comprise an epitope from SEQ ID NO: 22. Other preferred fragments lack one or more amino acids (e.g. 1, 2, 3, 4, 5, 6, 7, 8, 9, 10, 15, 20, 25 or more) from the C-terminus and/or one or more amino acids (e.g. 1, 2, 3, 4, 5, 6, 7, 8, 9, 10, 15, 20, 25 or more) from the N-terminus of SEQ ID NO: 22 while retaining at least one epitope of SEQ ID NO: 22. Other fragments omit one or more protein domains.

[0324] CbpD

[0325] CbpD is the Choline binding protein D. For reference purposes, the amino acid sequence of full length CbpD is SEQ ID NO: 23 herein. In the R6 genome CbpD is spr2006 [205].

[0326] Preferred CbpD polypeptides for use with the invention comprise an amino acid sequence: (a) having 50% or more identity (e.g. 60%, 65%, 70%, 75%, 80%, 85%, 90%, 91%, 92%, 93%, 94%, 95%, 96%, 97%, 98%, 99%, 99.5% or more) to SEQ ID NO: 23; and/or (b) comprising a fragment of at least ‘n’ consecutive amino acids of SEQ ID NO: 23, wherein ‘n’ is 7 or more (e.g. 8, 10, 12, 14, 16, 18, 20, 25, 30, 35, 40, 50, 60, 70, 80, 90, 100, 150, 200, 250 or more). These CbpD proteins include variants of SEQ ID NO: 23 (e.g. SEQ ID NO: 119; see below). Preferred fragments of (b) comprise an epitope from SEQ ID NO: 23. Other preferred fragments lack one or more amino acids (e.g. 1, 2, 3, 4, 5, 6, 7, 8, 9, 10, 15, 20, 25 or more) from the C-terminus and/or one or more amino acids (e.g. 1, 2, 3, 4, 5, 6, 7, 8, 9, 10, 15, 20, 25 or more) from the N-terminus of SEQ ID NO: 23 while retaining at least one epitope of SEQ ID NO: 23. Other fragments omit one or more protein domains.

[0327] The use of CbpD for immunisation is reported in reference 103.

[0328] A variant of SEQ ID NO: 23 is SEQ ID NO: 119 herein. The use of SEQ ID NO: 119 for immunisation is reported in reference 82 (SEQ ID NO: 241 therein). Thus a CbpD polypeptide for use with the invention may comprise an amino acid sequence: (a) having 50% or more identity (e.g. 60%, 65%, 70%, 75%, 80%, 85%, 90%, 91%, 92%, 93%, 94%, 95%, 96%, 97%, 98%, 99%, 99.5% or more) to SEQ ID NO: 119; and/or (b) comprising a fragment of at least ‘n’ consecutive amino acids of SEQ ID NO: 119, wherein ‘n’ is 7 or more (e.g. 8, 10, 12, 14, 16, 18, 20, 25, 30, 35, 40, 50, 60, 70, 80, 90, 100, 150, 200, 250 or more). These CbpD proteins include variants of SEQ ID NO: 119. Preferred fragments of (b) comprise an epitope from SEQ ID NO: 119. Other preferred fragments lack one or more amino acids (e.g. 1, 2, 3, 4, 5, 6, 7, 8, 9, 10, 15, 20, 25 or more) from the C-terminus and/or one or more amino acids (e.g. 1, 2, 3, 4, 5, 6, 7, 8, 9, 10, 15, 20, 25 or more) from the N-terminus of SEQ ID NO: 119 while retaining at least one epitope of SEQ ID NO: 119. Other fragments omit one or more protein domains.

[0329] Immunogenic fragments of SEQ ID NO: 119 are identified in table 1 of reference 82.

[0330] CbpG

[0331] CbpG is the Choline binding protein G. For reference purposes, the amino acid sequence of full length CbpG is SEQ ID NO: 24 herein. In the R6 genome CbpG is spr0350 [205].

[0332] Preferred CbpG polypeptides for use with the invention comprise an amino acid sequence: (a) having 50% or more identity (e.g. 60%, 65%, 70%, 75%, 80%, 85%, 90%, 91%, 92%, 93%, 94%, 95%, 96%, 97%, 98%, 99%, 99.5% or more) to SEQ ID NO: 24; and/or (b) comprising a fragment of at least ‘n’ consecutive amino acids of SEQ ID NO: 24, wherein ‘n’ is 7 or more (e.g. 8, 10, 12, 14, 16, 18, 20, 25, 30, 35, 40, 50, 60, 70, 80, 90, 100, 150, 200, 250 or more). These CbpG proteins include variants of SEQ ID NO: 24. Preferred fragments of (b) comprise an epitope from SEQ ID NO: 24. Other preferred fragments lack one or more amino acids (e.g. 1, 2, 3, 4, 5, 6, 7, 8, 9, 10, 15, 20, 25 or more) from the C-terminus and/or one or more amino acids (e.g. 1, 2, 3, 4, 5, 6, 7, 8, 9, 10, 15, 20, 25 or more) from the N-terminus of SEQ ID NO: 24 while retaining at least one epitope of SEQ ID NO: 24. Other fragments omit one or more protein domains.

[0333] The use of CbpG for immunisation is reported in reference 103.

[0334] PvaA

[0335] PvaA (Streptococcus pneumoniae pneumococcal vaccine antigen A) is also known as sp101. For reference purposes, the amino acid sequence of full length PvaA is SEQ ID NO: 25 herein. In the R6 genome PvaA is spr0930 [205].

[0336] Preferred PvaA polypeptides for use with the invention comprise an amino acid sequence: (a) having 50% or more identity (e.g. 60%, 65%, 70%, 75%, 80%, 85%, 90%, 91%, 92%, 93%, 94%, 95%, 96%, 97%, 98%, 99%, 99.5% or more) to SEQ ID NO: 25; and/or (b) comprising a fragment of at least ‘n’ consecutive amino acids of SEQ ID NO: 25, wherein ‘n’ is 7 or more (e.g. 8, 10, 12, 14, 16, 18, 20, 25, 30, 35, 40, 50, 60, 70, 80, 90, 100, 150, 200, 250 or more). These PvaA proteins include variants of SEQ ID NO: 25. Preferred fragments of (b) comprise an epitope from SEQ ID NO: 25. Other preferred fragments lack one or more amino acids (e.g. 1, 2, 3, 4, 5, 6, 7, 8, 9, 10, 15, 20, 25 or more) from the C-terminus and/or one or more amino acids (e.g. 1, 2, 3, 4, 5, 6, 7, 8, 9, 10, 15, 20, 25 or more) from the N-terminus of SEQ ID NO: 25 while retaining at least one epitope of SEQ ID NO: 25. Other fragments omit one or more protein domains.

[0337] The use of PvaA for immunisation is reported in references 100 and 101.

[0338] CPL1

[0339] CPL1 is the pneumococcal phage CP1 lysozyme. For reference purposes, the amino acid sequence of full length CPL1 is SEQ ID NO: 26 herein.

[0340] Preferred CPL1 polypeptides for use with the invention comprise an amino acid sequence: (a) having 50% or more identity (e.g. 60%, 65%, 70%, 75%, 80%, 85%, 90%, 91%, 92%, 93%, 94%, 95%, 96%, 97%, 98%, 99%, 99.5% or more) to SEQ ID NO: 26; and/or (b) comprising a fragment of at least ‘n’ consecutive amino acids of SEQ ID NO: 26, wherein ‘n’ is 7 or more (e.g. 8, 10, 12, 14, 16, 18, 20, 25, 30, 35, 40, 50, 60, 70, 80, 90, 100, 150, 200, 250 or more). These CPL1 proteins include variants of SEQ ID NO: 26. Preferred fragments of (b) comprise an epitope from SEQ ID NO: 26. Other preferred fragments lack one or more amino acids (e.g. 1, 2, 3, 4, 5, 6, 7, 8, 9, 10, 15, 20, 25 or more) from the C-terminus and/or one or more amino acids (e.g. 1, 2, 3, 4, 5, 6, 7, 8, 9, 10, 15, 20, 25 or more) from the N-terminus of SEQ ID NO: 26 while retaining at least one epitope of SEQ ID NO: 26. Other fragments omit one or more protein domains.

[0341] The use of CPL1 for immunisation is reported in reference 94, particularly in a form comprising the CPL1 choline binding domain fused to a heterologous promiscuous T helper epitope.

[0342] PspC

[0343] PspC is the pneumococcal surface protein C [102] and is also known as choline-binding protein A (CbpA). Its use for immunisation is reported in references 100 and 103. In the R6 strain it is spr1995 and, for reference, the amino acid sequence of full length spr1995 is SEQ ID NO: 15 herein.

[0344] Preferred PspC polypeptides for use with the invention comprise an amino acid sequence: (a) having 50% or more identity (e.g. 60%, 65%, 70%, 75%, 80%, 85%, 90%, 91%, 92%, 93%, 94%, 95%, 96%, 97%, 98%, 99%, 99.5% or more) to SEQ ID NO: 15; and/or (b) comprising a fragment of at least ‘n’ consecutive amino acids of SEQ ID NO: 15, wherein ‘n’ is 7 or more (e.g. 8, 10, 12, 14, 16, 18, 20, 25, 30, 35, 40, 50, 60, 70, 80, 90, 100, 150, 200, 250 or more). These spr1995 proteins include variants of SEQ ID NO: 15 (e.g. SEQ ID NO: 27; see below). Preferred fragments of (b) comprise an epitope from SEQ ID NO: 15. Other preferred fragments lack one or more amino acids (e.g. 1, 2, 3, 4, 5, 6, 7, 8, 9, 10, 15, 20, 25 or more) from the C-terminus and/or one or more amino acids (e.g. 1, 2, 3, 4, 5, 6, 7, 8, 9, 10, 15, 20, 25 or more) from the N-terminus of SEQ ID NO: 15 while retaining at least one epitope of SEQ ID NO: 15. Other fragments omit one or more protein domains.

[0345] A variant of PspC is known as ‘Hic’. It is similar to PspC, as shown in FIG. 1 of reference 104, where it is reported to bind to factor H (fH). For reference purposes, the amino acid sequence of full length Hic is SEQ ID NO: 27 herein. A Hic protein may be used with the invention in addition to or in place of a PspC polypeptide.

[0346] Preferred Hic polypeptides for use with the invention comprise an amino acid sequence: (a) having 50% or more identity (e.g. 60%, 65%, 70%, 75%, 80%, 85%, 90%, 91%, 92%, 93%, 94%, 95%, 96%, 97%, 98%, 99%, 99.5% or more) to SEQ ID NO: 27; and/or (b) comprising a fragment of at least ‘n’ consecutive amino acids of SEQ ID NO: 27, wherein ‘n’ is 7 or more (e.g. 8, 10, 12, 14, 16, 18, 20, 25, 30, 35, 40, 50, 60, 70, 80, 90, 100, 150, 200, 250 or more). These Hic proteins include variants of SEQ ID NO: 27. Preferred fragments of (b) comprise an epitope from SEQ ID NO: 27. Other preferred fragments lack one or more amino acids (e.g. 1, 2, 3, 4, 5, 6, 7, 8, 9, 10, 15, 20, 25 or more) from the C-terminus and/or one or more amino acids (e.g. 1, 2, 3, 4, 5, 6, 7, 8, 9, 10, 15, 20, 25 or more) from the N-terminus of SEQ ID NO: 27 while retaining at least one epitope of SEQ ID NO: 27. Other fragments omit one or more protein domains.

[0347] PspC and/or Hic can advantageously be used in combination with PspA and/or PsaA.

[0348] Pmp

[0349] Pmp is a peptidylprolyl isomerase, also known as protease maturation protein. For reference purposes, the amino acid sequence of full length Pmp is SEQ ID NO: 28 herein. In the R6 genome Pmp is spr0884 [205].

[0350] Preferred Pmp polypeptides for use with the invention comprise an amino acid sequence: (a) having 50% or more identity (e.g. 60%, 65%, 70%, 75%, 80%, 85%, 90%, 91%, 92%, 93%, 94%, 95%, 96%, 97%, 98%, 99%, 99.5% or more) to SEQ ID NO: 28; and/or (b) comprising a fragment of at least ‘n’ consecutive amino acids of SEQ ID NO: 28, wherein ‘n’ is 7 or more (e.g. 8, 10, 12, 14, 16, 18, 20, 25, 30, 35, 40, 50, 60, 70, 80, 90, 100, 150, 200, 250 or more). These Pmp proteins include variants of SEQ ID NO: 28. Preferred fragments of (b) comprise an epitope from SEQ ID NO: 28. Other preferred fragments lack one or more amino acids (e.g. 1, 2, 3, 4, 5, 6, 7, 8, 9, 10, 15, 20, 25 or more) from the C-terminus and/or one or more amino acids (e.g. 1, 2, 3, 4, 5, 6, 7, 8, 9, 10, 15, 20, 25 or more) from the N-terminus of SEQ ID NO: 28 while retaining at least one epitope of SEQ ID NO: 28. Other fragments omit one or more protein domains. One suitable fragment is SEQ ID NO: 186, which omits the natural leader peptide sequence.

[0351] The use of Pmp for immunisation is reported in reference 105.

[0352] PspA

[0353] PspA is the Pneumococcal surface protein A. For reference purposes, the amino acid sequence of full length PspA is SEQ ID NO: 29 herein. In the R6 genome PspA is spr0121 [205].

[0354] Preferred PspA polypeptides for use with the invention comprise an amino acid sequence: (a) having 50% or more identity (e.g. 60%, 65%, 70%, 75%, 80%, 85%, 90%, 91%, 92%, 93%, 94%, 95%, 96%, 97%, 98%, 99%, 99.5% or more) to SEQ ID NO: 29; and/or (b) comprising a fragment of at least ‘n’ consecutive amino acids of SEQ ID NO: 29, wherein ‘n’ is 7 or more (e.g. 8, 10, 12, 14, 16, 18, 20, 25, 30, 35, 40, 50, 60, 70, 80, 90, 100, 150, 200, 250 or more). These PspA proteins include variants of SEQ ID NO: 29. Preferred fragments of (b) comprise an epitope from SEQ ID NO: 29. Other preferred fragments lack one or more amino acids (e.g. 1, 2, 3, 4, 5, 6, 7, 8, 9, 10, 15, 20, 25 or more) from the C-terminus and/or one or more amino acids (e.g. 1, 2, 3, 4, 5, 6, 7, 8, 9, 10, 15, 20, 25 or more) from the N-terminus of SEQ ID NO: 29 while retaining at least one epitope of SEQ ID NO: 29. Other fragments omit one or more protein domains.

[0355] The use of PspA for immunisation is reported inter alia in reference 106. It can advantageously be administered in combination with PspC.

[0356] PsaA

[0357] PsaA is the Pneumococcal surface adhesin. For reference purposes, the amino acid sequence of full length PsaA is SEQ ID NO: 30 herein.

[0358] Preferred PsaA polypeptides for use with the invention comprise an amino acid sequence: (a) having 50% or more identity (e.g. 60%, 65%, 70%, 75%, 80%, 85%, 90%, 91%, 92%, 93%, 94%, 95%, 96%, 97%, 98%, 99%, 99.5% or more) to SEQ ID NO: 30; and/or (b) comprising a fragment of at least ‘n’ consecutive amino acids of SEQ ID NO: 30, wherein ‘n’ is 7 or more (e.g. 8, 10, 12, 14, 16, 18, 20, 25, 30, 35, 40, 50, 60, 70, 80, 90, 100, 150, 200, 250 or more). These PsaA proteins include variants of SEQ ID NO: 30. Preferred fragments of (b) comprise an epitope from SEQ ID NO: 30. Other preferred fragments lack one or more amino acids (e.g. 1, 2, 3, 4, 5, 6, 7, 8, 9, 10, 15, 20, 25 or more) from the C-terminus and/or one or more amino acids (e.g. 1, 2, 3, 4, 5, 6, 7, 8, 9, 10, 15, 20, 25 or more) from the N-terminus of SEQ ID NO: 30 while retaining at least one epitope of SEQ ID NO: 30. Other fragments omit one or more protein domains. A useful fragment of PsaA is disclosed as SEQ ID NO: 3 in reference 91 (corresponding to amino acids 21-309 of SEQ ID NO: 30 herein).

[0359] The use of PsaA for immunisation is reported in reference 107. It can be used in combination with PspA and/or PspC.

[0360] PrtA

[0361] PrtA is the cell wall-associated serine proteinase. It has also been known as sp128 and sp130, and is in a subtilisin-like serine protease. For reference purposes, the amino acid sequence of full length PrtA precursor is SEQ ID NO: 31 herein. In the R6 genome PrtA is spr0561 [205].

[0362] Preferred PrtA polypeptides for use with the invention comprise an amino acid sequence: (a) having 50% or more identity (e.g. 60%, 65%, 70%, 75%, 80%, 85%, 90%, 91%, 92%, 93%, 94%, 95%, 96%, 97%, 98%, 99%, 99.5% or more) to SEQ ID NO: 31; and/or (b) comprising a fragment of at least ‘n’ consecutive amino acids of SEQ ID NO: 31, wherein ‘n’ is 7 or more (e.g. 8, 10, 12, 14, 16, 18, 20, 25, 30, 35, 40, 50, 60, 70, 80, 90, 100, 150, 200, 250 or more). These PrtA proteins include variants of SEQ ID NO: 31. Preferred fragments of (b) comprise an epitope from SEQ ID NO: 31. Other preferred fragments lack one or more amino acids (e.g. 1, 2, 3, 4, 5, 6, 7, 8, 9, 10, 15, 20, 25 or more) from the C-terminus and/or one or more amino acids (e.g. 1, 2, 3, 4, 5, 6, 7, 8, 9, 10, 15, 20, 25 or more) from the N-terminus of SEQ ID NO: 31 while retaining at least one epitope of SEQ ID NO: 31. Other fragments omit one or more protein domains.

[0363] The use of PrtA for immunisation is reported in references 108 & 109, and also in reference 100.

[0364] Sp133

[0365] Sp133 is a conserved pneumococcal antigen. For reference purposes, the amino acid sequence of full length Sp133 is SEQ ID NO: 32 herein. In the R6 genome Sp133 is spr0931 [205].

[0366] Preferred Sp133 polypeptides for use with the invention comprise an amino acid sequence: (a) having 50% or more identity (e.g. 60%, 65%, 70%, 75%, 80%, 85%, 90%, 91%, 92%, 93%, 94%, 95%, 96%, 97%, 98%, 99%, 99.5% or more) to SEQ ID NO: 32; and/or (b) comprising a fragment of at least ‘n’ consecutive amino acids of SEQ ID NO: 32, wherein ‘n’ is 7 or more (e.g. 8, 10, 12, 14, 16, 18, 20, 25, 30, 35, 40, 50, 60, 70, 80, 90, 100, 150, 200, 250 or more). These Sp133 proteins include variants of SEQ ID NO: 32. Preferred fragments of (b) comprise an epitope from SEQ ID NO: 32. Other preferred fragments lack one or more amino acids (e.g. 1, 2, 3, 4, 5, 6, 7, 8, 9, 10, 15, 20, 25 or more) from the C-terminus and/or one or more amino acids (e.g. 1, 2, 3, 4, 5, 6, 7, 8, 9, 10, 15, 20, 25 or more) from the N-terminus of SEQ ID NO: 32 while retaining at least one epitope of SEQ ID NO: 32. Other fragments omit one or more protein domains.

[0367] The use of Sp133 for immunisation is reported in reference 110.

[0368] PiaA

[0369] PiaA is the membrane permease involved in iron acquisition by pneumococcus. For reference purposes, the amino acid sequence of full length PiaA is SEQ ID NO: 33 herein. In the R6 genome PiaA is spr0935 [205].

[0370] Preferred PiaA polypeptides for use with the invention comprise an amino acid sequence: (a) having 50% or more identity (e.g. 60%, 65%, 70%, 75%, 80%, 85%, 90%, 91%, 92%, 93%, 94%, 95%, 96%, 97%, 98%, 99%, 99.5% or more) to SEQ ID NO: 33; and/or (b) comprising a fragment of at least ‘n’ consecutive amino acids of SEQ ID NO: 33, wherein ‘n’ is 7 or more (e.g. 8, 10, 12, 14, 16, 18, 20, 25, 30, 35, 40, 50, 60, 70, 80, 90, 100, 150, 200, 250 or more). These PiaA proteins include variants of SEQ ID NO: 33. Preferred fragments of (b) comprise an epitope from SEQ ID NO: 33. Other preferred fragments lack one or more amino acids (e.g. 1, 2, 3, 4, 5, 6, 7, 8, 9, 10, 15, 20, 25 or more) from the C-terminus and/or one or more amino acids (e.g. 1, 2, 3, 4, 5, 6, 7, 8, 9, 10, 15, 20, 25 or more) from the N-terminus of SEQ ID NO: 33 while retaining at least one epitope of SEQ ID NO: 33. Other fragments omit one or more protein domains.

[0371] The use of PiaA for immunisation is reported in references 111, 112 and 113, particularly in combination with PiuA.

[0372] PiuA

[0373] PiuA is the ABC transporter substrate-binding protein for ferric iron transport. It is also known as FatB. For reference purposes, the amino acid sequence of full length PiuA is SEQ ID NO: 34 herein. In the R6 genome PiuA is spr1687 [205].

[0374] Preferred PiuA polypeptides for use with the invention comprise an amino acid sequence: (a) having 50% or more identity (e.g. 60%, 65%, 70%, 75%, 80%, 85%, 90%, 91%, 92%, 93%, 94%, 95%, 96%, 97%, 98%, 99%, 99.5% or more) to SEQ ID NO: 34; and/or (b) comprising a fragment of at least ‘n’ consecutive amino acids of SEQ ID NO: 34, wherein ‘n’ is 7 or more (e.g. 8, 10, 12, 14, 16, 18, 20, 25, 30, 35, 40, 50, 60, 70, 80, 90, 100, 150, 200, 250 or more). These PiuA proteins include variants of SEQ ID NO: 34. Preferred fragments of (b) comprise an epitope from SEQ ID NO: 34. Other preferred fragments lack one or more amino acids (e.g. 1, 2, 3, 4, 5, 6, 7, 8, 9, 10, 15, 20, 25 or more) from the C-terminus and/or one or more amino acids (e.g. 1, 2, 3, 4, 5, 6, 7, 8, 9, 10, 15, 20, 25 or more) from the N-terminus of SEQ ID NO: 34 while retaining at least one epitope of SEQ ID NO: 34. Other fragments omit one or more protein domains.

[0375] The use of PiuA for immunisation is reported in refs 111 to 113, particularly in combination with PiaA.

[0376] IC1

[0377] IC1 is annotated in reference 82 as a hypothetical protein. For reference purposes, the amino acid sequence of full length IC1 is SEQ ID NO: 35 herein. In the R6 genome IC1 is spr0008 [205]. The use of IC1 for immunisation is reported in reference 82 (SEQ ID NO: 145 therein).

[0378] Preferred IC1 polypeptides for use with the invention comprise an amino acid sequence: (a) having 50% or more identity (e.g. 60%, 65%, 70%, 75%, 80%, 85%, 90%, 91%, 92%, 93%, 94%, 95%, 96%, 97%, 98%, 99%, 99.5% or more) to SEQ ID NO: 35; and/or (b) comprising a fragment of at least ‘n’ consecutive amino acids of SEQ ID NO: 35, wherein ‘n’ is 7 or more (e.g. 8, 10, 12, 14, 16, 18, 20, 25, 30, 35, 40, 50, 60, 70, 80, 90, 100, 150, 200, 250 or more). These IC1 proteins include variants of SEQ ID NO: 35. Preferred fragments of (b) comprise an epitope from SEQ ID NO: 35. Other preferred fragments lack one or more amino acids (e.g. 1, 2, 3, 4, 5, 6, 7, 8, 9, 10, 15, 20, 25 or more) from the C-terminus and/or one or more amino acids (e.g. 1, 2, 3, 4, 5, 6, 7, 8, 9, 10, 15, 20, 25 or more) from the N-terminus of SEQ ID NO: 35 while retaining at least one epitope of SEQ ID NO: 35. Other fragments omit one or more protein domains. Immunogenic fragments of IC1 are identified in table 1 of reference 82.

[0379] IC2

[0380] IC2 is the polA DNA polymerase I. For reference purposes, the amino acid sequence of full length IC2 is SEQ ID NO: 36 herein. In the R6 genome IC2 is spr0032 [205]. The use of IC2 for immunisation is reported in reference 82 (SEQ ID NO: 146 therein).

[0381] Preferred IC2 polypeptides for use with the invention comprise an amino acid sequence: (a) having 50% or more identity (e.g. 60%, 65%, 70%, 75%, 80%, 85%, 90%, 91%, 92%, 93%, 94%, 95%, 96%, 97%, 98%, 99%, 99.5% or more) to SEQ ID NO: 36; and/or (b) comprising a fragment of at least ‘n’ consecutive amino acids of SEQ ID NO: 36, wherein ‘n’ is 7 or more (e.g. 8, 10, 12, 14, 16, 18, 20, 25, 30, 35, 40, 50, 60, 70, 80, 90, 100, 150, 200, 250 or more). These IC2 proteins include variants of SEQ ID NO: 36. Preferred fragments of (b) comprise an epitope from SEQ ID NO: 36. Other preferred fragments lack one or more amino acids (e.g. 1, 2, 3, 4, 5, 6, 7, 8, 9, 10, 15, 20, 25 or more) from the C-terminus and/or one or more amino acids (e.g. 1, 2, 3, 4, 5, 6, 7, 8, 9, 10, 15, 20, 25 or more) from the N-terminus of SEQ ID NO: 36 while retaining at least one epitope of SEQ ID NO: 36. Other fragments omit one or more protein domains. Immunogenic fragments of IC2 are identified in table 1 of reference 82.

[0382] IC3

[0383] IC3 is a choline-binding protein. For reference purposes, the amino acid sequence of full length IC3 is SEQ ID NO: 37 herein. In the R6 genome IC3 is spr1945 [205]. The use of IC3 for immunisation is reported in reference 82 (SEQ ID NO: 147 therein).

[0384] Preferred IC3 polypeptides for use with the invention comprise an amino acid sequence: (a) having 50% or more identity (e.g. 60%, 65%, 70%, 75%, 80%, 85%, 90%, 91%, 92%, 93%, 94%, 95%, 96%, 97%, 98%, 99%, 99.5% or more) to SEQ ID NO: 37; and/or (b) comprising a fragment of at least ‘n’ consecutive amino acids of SEQ ID NO: 37, wherein ‘n’ is 7 or more (e.g. 8, 10, 12, 14, 16, 18, 20, 25, 30, 35, 40, 50, 60, 70, 80, 90, 100, 150, 200, 250 or more). These IC3 proteins include variants of SEQ ID NO: 37. Preferred fragments of (b) comprise an epitope from SEQ ID NO: 37. Other preferred fragments lack one or more amino acids (e.g. 1, 2, 3, 4, 5, 6, 7, 8, 9, 10, 15, 20, 25 or more) from the C-terminus and/or one or more amino acids (e.g. 1, 2, 3, 4, 5, 6, 7, 8, 9, 10, 15, 20, 25 or more) from the N-terminus of SEQ ID NO: 37 while retaining at least one epitope of SEQ ID NO: 37. Other fragments omit one or more protein domains. Immunogenic fragments of IC3 are identified in table 1 of reference 82.

[0385] IC4

[0386] IC4 is an IgA1 protease. For reference purposes, the amino acid sequence of full length IC4 is SEQ ID NO: 38 herein. In the R6 genome IC4 is spr1042 [205]. The use of IC4 for immunisation is reported in reference 82 (SEQ ID NO: 148 therein).

[0387] Preferred IC4 polypeptides for use with the invention comprise an amino acid sequence: (a) having 50% or more identity (e.g. 60%, 65%, 70%, 75%, 80%, 85%, 90%, 91%, 92%, 93%, 94%, 95%, 96%, 97%, 98%, 99%, 99.5% or more) to SEQ ID NO: 38; and/or (b) comprising a fragment of at least ‘n’ consecutive amino acids of SEQ ID NO: 38, wherein ‘n’ is 7 or more (e.g. 8, 10, 12, 14, 16, 18, 20, 25, 30, 35, 40, 50, 60, 70, 80, 90, 100, 150, 200, 250 or more). These IC4 proteins include variants of SEQ ID NO: 38. Preferred fragments of (b) comprise an epitope from SEQ ID NO: 38. Other preferred fragments lack one or more amino acids (e.g. 1, 2, 3, 4, 5, 6, 7, 8, 9, 10, 15, 20, 25 or more) from the C-terminus and/or one or more amino acids (e.g. 1, 2, 3, 4, 5, 6, 7, 8, 9, 10, 15, 20, 25 or more) from the N-terminus of SEQ ID NO: 38 while retaining at least one epitope of SEQ ID NO: 38. Other fragments omit one or more protein domains. Immunogenic fragments of IC4 are identified in table 1 of reference 82.

[0388] IC5

[0389] IC5 is annotated as a hypothetical protein, but is maybe a cell wall surface anchor. For reference purposes, the amino acid sequence of full length IC5 is SEQ ID NO: 39 herein. In the R6 genome IC5 is spr0075 [205]. The use of IC5 for immunisation is reported in reference 82 (SEQ ID NO: 149 therein).

[0390] Preferred IC5 polypeptides for use with the invention comprise an amino acid sequence: (a) having 50% or more identity (e.g. 60%, 65%, 70%, 75%, 80%, 85%, 90%, 91%, 92%, 93%, 94%, 95%, 96%, 97%, 98%, 99%, 99.5% or more) to SEQ ID NO: 39; and/or (b) comprising a fragment of at least ‘n’ consecutive amino acids of SEQ ID NO: 39, wherein ‘n’ is 7 or more (e.g. 8, 10, 12, 14, 16, 18, 20, 25, 30, 35, 40, 50, 60, 70, 80, 90, 100, 150, 200, 250 or more). These IC5 proteins include variants of SEQ ID NO: 39. Preferred fragments of (b) comprise an epitope from SEQ ID NO: 39. Other preferred fragments lack one or more amino acids (e.g. 1, 2, 3, 4, 5, 6, 7, 8, 9, 10, 15, 20, 25 or more) from the C-terminus and/or one or more amino acids (e.g. 1, 2, 3, 4, 5, 6, 7, 8, 9, 10, 15, 20, 25 or more) from the N-terminus of SEQ ID NO: 39 while retaining at least one epitope of SEQ ID NO: 39. Other fragments omit one or more protein domains. Immunogenic fragments of IC5 are identified in table 1 of reference 82.

[0391] IC6

[0392] IC6 is a variant form of spr0096, as reported above (SEQ ID NO: 40 herein). Useful IC6 polypeptides for use with the invention comprise an amino acid sequence: (a) having 50% or more identity (e.g. 60%, 65%, 70%, 75%, 80%, 85%, 90%, 91%, 92%, 93%, 94%, 95%, 96%, 97%, 98%, 99%, 99.5% or more) to SEQ ID NO: 40; and/or (b) comprising a fragment of at least ‘n’ consecutive amino acids of SEQ ID NO: 40, wherein ‘n’ is 7 or more (e.g. 8, 10, 12, 14, 16, 18, 20, 25, 30, 35, 40, 50, 60, 70, 80, 90, 100, 150, 200, 250 or more). These IC6 proteins include variants of SEQ ID NO: 40. Preferred fragments of (b) comprise an epitope from SEQ ID NO: 40. Other preferred fragments lack one or more amino acids (e.g. 1, 2, 3, 4, 5, 6, 7, 8, 9, 10, 15, 20, 25 or more) from the C-terminus and/or one or more amino acids (e.g. 1, 2, 3, 4, 5, 6, 7, 8, 9, 10, 15, 20, 25 or more) from the N-terminus of SEQ ID NO: 40 while retaining at least one epitope of SEQ ID NO: 40. Other fragments omit one or more protein domains.

[0393] IC7

[0394] IC7 is annotated in reference 82 as a hypothetical protein. For reference purposes, the amino acid sequence of full length IC7 is SEQ ID NO: 41 herein. In the R6 genome IC7 is spr0174 [205]. The use of IC7 for immunisation is reported in reference 82 (SEQ ID NO: 152 therein).

[0395] Preferred IC7 polypeptides for use with the invention comprise an amino acid sequence: (a) having 50% or more identity (e.g. 60%, 65%, 70%, 75%, 80%, 85%, 90%, 91%, 92%, 93%, 94%, 95%, 96%, 97%, 98%, 99%, 99.5% or more) to SEQ ID NO: 41; and/or (b) comprising a fragment of at least ‘n’ consecutive amino acids of SEQ ID NO: 41, wherein ‘n’ is 7 or more (e.g. 8, 10, 12, 14, 16, 18, 20, 25, 30, 35, 40, 50, 60, 70, 80, 90, 100, 150, 200, 250 or more). These IC7 proteins include variants of SEQ ID NO: 41. Preferred fragments of (b) comprise an epitope from SEQ ID NO: 41. Other preferred fragments lack one or more amino acids (e.g. 1, 2, 3, 4, 5, 6, 7, 8, 9, 10, 15, 20, 25 or more) from the C-terminus and/or one or more amino acids (e.g. 1, 2, 3, 4, 5, 6, 7, 8, 9, 10, 15, 20, 25 or more) from the N-terminus of SEQ ID NO: 41 while retaining at least one epitope of SEQ ID NO: 41. Other fragments omit one or more protein domains. Immunogenic fragments of IC7 are identified in table 1 of reference 82.

[0396] IC8

[0397] IC8 is a Dihydrofolate:folylpolyglutamate synthetase. For reference purposes, the amino acid sequence of full length IC8 is SEQ ID NO: 42 herein. In the R6 genome IC8 is spr0178 [205]. The use of IC8 for immunisation is reported in reference 82 (SEQ ID NO: 153 therein). Preferred IC8 polypeptides for use with the invention comprise an amino acid sequence: (a) having 50% or more identity (e.g. 60%, 65%, 70%, 75%, 80%, 85%, 90%, 91%, 92%, 93%, 94%, 95%, 96%, 97%, 98%, 99%, 99.5% or more) to SEQ ID NO: 42; and/or (b) comprising a fragment of at least ‘n’ consecutive amino acids of SEQ ID NO: 42, wherein ‘n’ is 7 or more (e.g. 8, 10, 12, 14, 16, 18, 20, 25, 30, 35, 40, 50, 60, 70, 80, 90, 100, 150, 200, 250 or more). These IC8 proteins include variants of SEQ ID NO: 42. Preferred fragments of (b) comprise an epitope from SEQ ID NO: 42. Other preferred fragments lack one or more amino acids (e.g. 1, 2, 3, 4, 5, 6, 7, 8, 9, 10, 15, 20, 25 or more) from the C-terminus and/or one or more amino acids (e.g. 1, 2, 3, 4, 5, 6, 7, 8, 9, 10, 15, 20, 25 or more) from the N-terminus of SEQ ID NO: 42 while retaining at least one epitope of SEQ ID NO: 42. Other fragments omit one or more protein domains. Immunogenic fragments of IC8 are identified in table 1 of reference 82.

[0398] IC9

[0399] IC9 is a 50S ribosomal protein L2. For reference purposes, the amino acid sequence of full length IC9 is SEQ ID NO: 43 herein. In the R6 genome IC9 is spr0191 [205]. The use of IC9 for immunisation is reported in reference 82 (SEQ ID NO: 154 therein).

[0400] Preferred IC9 polypeptides for use with the invention comprise an amino acid sequence: (a) having 50% or more identity (e.g. 60%, 65%, 70%, 75%, 80%, 85%, 90%, 91%, 92%, 93%, 94%, 95%, 96%, 97%, 98%, 99%, 99.5% or more) to SEQ ID NO: 43; and/or (b) comprising a fragment of at least ‘n’ consecutive amino acids of SEQ ID NO: 43, wherein ‘n’ is 7 or more (e.g. 8, 10, 12, 14, 16, 18, 20, 25, 30, 35, 40, 50, 60, 70, 80, 90, 100, 150, 200, 250 or more). These IC9 proteins include variants of SEQ ID NO: 43. Preferred fragments of (b) comprise an epitope from SEQ ID NO: 43. Other preferred fragments lack one or more amino acids (e.g. 1, 2, 3, 4, 5, 6, 7, 8, 9, 10, 15, 20, 25 or more) from the C-terminus and/or one or more amino acids (e.g. 1, 2, 3, 4, 5, 6, 7, 8, 9, 10, 15, 20, 25 or more) from the N-terminus of SEQ ID NO: 43 while retaining at least one epitope of SEQ ID NO: 43. Other fragments omit one or more protein domains. Immunogenic fragments of IC9 are identified in table 1 of reference 82.

[0401] IC10

[0402] IC10 is a 30S Ribosomal protein S14. For reference purposes, the amino acid sequence of full length IC10 is SEQ ID NO: 44 herein. In the R6 genome IC10 is spr0202 [205]. The use of IC10 for immunisation is reported in reference 82 (SEQ ID NO: 155 therein).

[0403] Preferred IC10 polypeptides for use with the invention comprise an amino acid sequence: (a) having 50% or more identity (e.g. 60%, 65%, 70%, 75%, 80%, 85%, 90%, 91%, 92%, 93%, 94%, 95%, 96%, 97%, 98%, 99%, 99.5% or more) to SEQ ID NO: 44; and/or (b) comprising a fragment of at least ‘n’ consecutive amino acids of SEQ ID NO: 44, wherein ‘n’ is 7 or more (e.g. 8, 10, 12, 14, 16, 18, 20, 25, 30, 35, 40, 50, 60, 70, 80, 90, 100, 150, 200, 250 or more). These IC10 proteins include variants of SEQ ID NO: 44. Preferred fragments of (b) comprise an epitope from SEQ ID NO: 44. Other preferred fragments lack one or more amino acids (e.g. 1, 2, 3, 4, 5, 6, 7, 8, 9, 10, 15, 20, 25 or more) from the C-terminus and/or one or more amino acids (e.g. 1, 2, 3, 4, 5, 6, 7, 8, 9, 10, 15, 20, 25 or more) from the N-terminus of SEQ ID NO: 44 while retaining at least one epitope of SEQ ID NO: 44. Other fragments omit one or more protein domains. Immunogenic fragments of IC10 are identified in table 1 of reference 82.

[0404] IC11

[0405] IC11 is annotated in reference 82 as a hypothetical protein. For reference purposes, the amino acid sequence of full length IC11 is SEQ ID NO: 45 herein. In the R6 genome IC11 is spr0218 [205]. The use of IC11 for immunisation is reported in reference 82 (SEQ ID NO: 156 therein).

[0406] Preferred IC11 polypeptides for use with the invention comprise an amino acid sequence: (a) having 50% or more identity (e.g. 60%, 65%, 70%, 75%, 80%, 85%, 90%, 91%, 92%, 93%, 94%, 95%, 96%, 97%, 98%, 99%, 99.5% or more) to SEQ ID NO: 45; and/or (b) comprising a fragment of at least ‘n’ consecutive amino acids of SEQ ID NO: 45, wherein ‘n’ is 7 or more (e.g. 8, 10, 12, 14, 16, 18, 20, 25, 30, 35, 40, 50, 60, 70, 80, 90, 100, 150, 200, 250 or more). These IC11 proteins include variants of SEQ ID NO: 45. Preferred fragments of (b) comprise an epitope from SEQ ID NO: 45. Other preferred fragments lack one or more amino acids (e.g. 1, 2, 3, 4, 5, 6, 7, 8, 9, 10, 15, 20, 25 or more) from the C-terminus and/or one or more amino acids (e.g. 1, 2, 3, 4, 5, 6, 7, 8, 9, 10, 15, 20, 25 or more) from the N-terminus of SEQ ID NO: 45 while retaining at least one epitope of SEQ ID NO: 45. Other fragments omit one or more protein domains. Immunogenic fragments of IC11 are identified in table 1 of reference 82.

[0407] IC12

[0408] IC12 is a Formate acetyltransferase 3. For reference purposes, the amino acid sequence of full length IC12 is SEQ ID NO: 46 herein. In the R6 genome IC12 is spr0232 [205]. The use of IC12 for immunisation is reported in reference 82 (SEQ ID NO: 157 therein).

[0409] Preferred IC12 polypeptides for use with the invention comprise an amino acid sequence: (a) having 50% or more identity (e.g. 60%, 65%, 70%, 75%, 80%, 85%, 90%, 91%, 92%, 93%, 94%, 95%, 96%, 97%, 98%, 99%, 99.5% or more) to SEQ ID NO: 46; and/or (b) comprising a fragment of at least ‘n’ consecutive amino acids of SEQ ID NO: 46, wherein ‘n’ is 7 or more (e.g. 8, 10, 12, 14, 16, 18, 20, 25, 30, 35, 40, 50, 60, 70, 80, 90, 100, 150, 200, 250 or more). These IC12 proteins include variants of SEQ ID NO: 46. Preferred fragments of (b) comprise an epitope from SEQ ID NO: 46. Other preferred fragments lack one or more amino acids (e.g. 1, 2, 3, 4, 5, 6, 7, 8, 9, 10, 15, 20, 25 or more) from the C-terminus and/or one or more amino acids (e.g. 1, 2, 3, 4, 5, 6, 7, 8, 9, 10, 15, 20, 25 or more) from the N-terminus of SEQ ID NO: 46 while retaining at least one epitope of SEQ ID NO: 46. Other fragments omit one or more protein domains. Immunogenic fragments of IC12 are identified in table 1 of reference 82.

[0410] IC13

[0411] IC13 is a 30S ribosomal protein S9. For reference purposes, the amino acid sequence of full length IC13 is SEQ ID NO: 47 herein. In the R6 genome IC13 is spr0272 [205]. The use of IC13 for immunisation is reported in reference 82 (SEQ ID NO: 158 therein).

[0412] Preferred IC13 polypeptides for use with the invention comprise an amino acid sequence: (a) having 50% or more identity (e.g. 60%, 65%, 70%, 75%, 80%, 85%, 90%, 91%, 92%, 93%, 94%, 95%, 96%, 97%, 98%, 99%, 99.5% or more) to SEQ ID NO: 47; and/or (b) comprising a fragment of at least ‘n’ consecutive amino acids of SEQ ID NO: 47, wherein ‘n’ is 7 or more (e.g. 8, 10, 12, 14, 16, 18, 20, 25, 30, 35, 40, 50, 60, 70, 80, 90, 100, 150, 200, 250 or more). These IC13 proteins include variants of SEQ ID NO: 47. Preferred fragments of (b) comprise an epitope from SEQ ID NO: 47. Other preferred fragments lack one or more amino acids (e.g. 1, 2, 3, 4, 5, 6, 7, 8, 9, 10, 15, 20, 25 or more) from the C-terminus and/or one or more amino acids (e.g. 1, 2, 3, 4, 5, 6, 7, 8, 9, 10, 15, 20, 25 or more) from the N-terminus of SEQ ID NO: 47 while retaining at least one epitope of SEQ ID NO: 47. Other fragments omit one or more protein domains. Immunogenic fragments of IC13 are identified in table 1 of reference 82.

[0413] IC14

[0414] IC14 is a Transcription regulator. For reference purposes, the amino acid sequence of full length IC14 is SEQ ID NO: 48 herein. In the R6 genome IC14 is spr0298 [205]. The use of IC14 for immunisation is reported in reference 82 (SEQ ID NO: 159 therein).

[0415] Preferred IC14 polypeptides for use with the invention comprise an amino acid sequence: (a) having 50% or more identity (e.g. 60%, 65%, 70%, 75%, 80%, 85%, 90%, 91%, 92%, 93%, 94%, 95%, 96%, 97%, 98%, 99%, 99.5% or more) to SEQ ID NO: 48; and/or (b) comprising a fragment of at least ‘n’ consecutive amino acids of SEQ ID NO: 48, wherein ‘n’ is 7 or more (e.g. 8, 10, 12, 14, 16, 18, 20, 25, 30, 35, 40, 50, 60, 70, 80, 90, 100, 150, 200, 250 or more). These IC14 proteins include variants of SEQ ID NO: 48. Preferred fragments of (b) comprise an epitope from SEQ ID NO: 48. Other preferred fragments lack one or more amino acids (e.g. 1, 2, 3, 4, 5, 6, 7, 8, 9, 10, 15, 20, 25 or more) from the C-terminus and/or one or more amino acids (e.g. 1, 2, 3, 4, 5, 6, 7, 8, 9, 10, 15, 20, 25 or more) from the N-terminus of SEQ ID NO: 48 while retaining at least one epitope of SEQ ID NO: 48. Other fragments omit one or more protein domains. Immunogenic fragments of IC14 are identified in table 1 of reference 82.

[0416] IC15

[0417] IC15 is annotated in reference 82 as a cell wall surface anchor family protein. For reference purposes, the amino acid sequence of full length IC15 is SEQ ID NO: 49 herein. In the R6 genome IC15 is spr0328 [205]. The use of IC15 for immunisation is reported in reference 82 (SEQ ID NO: 160 therein), and it is shown to be protective in reference 114 (antigen SP0368).

[0418] Preferred IC15 polypeptides for use with the invention comprise an amino acid sequence: (a) having 50% or more identity (e.g. 60%, 65%, 70%, 75%, 80%, 85%, 90%, 91%, 92%, 93%, 94%, 95%, 96%, 97%, 98%, 99%, 99.5% or more) to SEQ ID NO: 49; and/or (b) comprising a fragment of at least ‘n’ consecutive amino acids of SEQ ID NO: 49, wherein ‘n’ is 7 or more (e.g. 8, 10, 12, 14, 16, 18, 20, 25, 30, 35, 40, 50, 60, 70, 80, 90, 100, 150, 200, 250 or more). These IC15 proteins include variants of SEQ ID NO: 49. Preferred fragments of (b) comprise an epitope from SEQ ID NO: 49. Other preferred fragments lack one or more amino acids (e.g. 1, 2, 3, 4, 5, 6, 7, 8, 9, 10, 15, 20, 25 or more) from the C-terminus and/or one or more amino acids (e.g. 1, 2, 3, 4, 5, 6, 7, 8, 9, 10, 15, 20, 25 or more) from the N-terminus of SEQ ID NO: 49 while retaining at least one epitope of SEQ ID NO: 49. Other fragments omit one or more protein domains. Immunogenic fragments of IC15 are identified in table 1 of reference 82.

[0419] IC16

[0420] IC16 is a Penicillin-binding protein 1A. For reference purposes, the amino acid sequence of full length IC16 is SEQ ID NO: 50 herein. In the R6 genome IC16 is spr0329 [205]. The use of IC16 for immunisation is reported in reference 82 (SEQ ID NO: 161 therein).

[0421] Preferred IC16 polypeptides for use with the invention comprise an amino acid sequence: (a) having 50% or more identity (e.g. 60%, 65%, 70%, 75%, 80%, 85%, 90%, 91%, 92%, 93%, 94%, 95%, 96%, 97%, 98%, 99%, 99.5% or more) to SEQ ID NO: 50; and/or (b) comprising a fragment of at least ‘n’ consecutive amino acids of SEQ ID NO: 50, wherein ‘n’ is 7 or more (e.g. 8, 10, 12, 14, 16, 18, 20, 25, 30, 35, 40, 50, 60, 70, 80, 90, 100, 150, 200, 250 or more). These IC16 proteins include variants of SEQ ID NO: 50. Preferred fragments of (b) comprise an epitope from SEQ ID NO: 50. Other preferred fragments lack one or more amino acids (e.g. 1, 2, 3, 4, 5, 6, 7, 8, 9, 10, 15, 20, 25 or more) from the C-terminus and/or one or more amino acids (e.g. 1, 2, 3, 4, 5, 6, 7, 8, 9, 10, 15, 20, 25 or more) from the N-terminus of SEQ ID NO: 50 while retaining at least one epitope of SEQ ID NO: 50. Other fragments omit one or more protein domains. Immunogenic fragments of IC16 are identified in table 1 of reference 82.

[0422] IC17

[0423] IC17 is annotated in reference 82 as a hypothetical protein. For reference purposes, the amino acid sequence of full length IC17 is SEQ ID NO: 51 herein. In the R6 genome IC17 is spr0334 [205]. The use of IC17 for immunisation is reported in reference 82 (SEQ ID NO: 162 therein).

[0424] Preferred IC17 polypeptides for use with the invention comprise an amino acid sequence: (a) having 50% or more identity (e.g. 60%, 65%, 70%, 75%, 80%, 85%, 90%, 91%, 92%, 93%, 94%, 95%, 96%, 97%, 98%, 99%, 99.5% or more) to SEQ ID NO: 51; and/or (b) comprising a fragment of at least ‘n’ consecutive amino acids of SEQ ID NO: 51, wherein ‘n’ is 7 or more (e.g. 8, 10, 12, 14, 16, 18, 20, 25, 30, 35, 40, 50, 60, 70, 80, 90, 100, 150, 200, 250 or more). These IC17 proteins include variants of SEQ ID NO: 51. Preferred fragments of (b) comprise an epitope from SEQ ID NO: 51. Other preferred fragments lack one or more amino acids (e.g. 1, 2, 3, 4, 5, 6, 7, 8, 9, 10, 15, 20, 25 or more) from the C-terminus and/or one or more amino acids (e.g. 1, 2, 3, 4, 5, 6, 7, 8, 9, 10, 15, 20, 25 or more) from the N-terminus of SEQ ID NO: 51 while retaining at least one epitope of SEQ ID NO: 51. Other fragments omit one or more protein domains. Immunogenic fragments of IC17 are identified in table 1 of reference 82.

[0425] IC18

[0426] IC18 is annotated in reference 82 as choline-binding protein F. For reference purposes, the amino acid sequence of full length IC18 is SEQ ID NO: 52 herein. In the R6 genome IC18 is spr0337 [205]. The use of IC18 for immunisation is reported in reference 82 (SEQ ID NO: 163 therein).

[0427] Preferred IC18 polypeptides for use with the invention comprise an amino acid sequence: (a) having 50% or more identity (e.g. 60%, 65%, 70%, 75%, 80%, 85%, 90%, 91%, 92%, 93%, 94%, 95%, 96%, 97%, 98%, 99%, 99.5% or more) to SEQ ID NO: 52; and/or (b) comprising a fragment of at least ‘n’ consecutive amino acids of SEQ ID NO: 52, wherein ‘n’ is 7 or more (e.g. 8, 10, 12, 14, 16, 18, 20, 25, 30, 35, 40, 50, 60, 70, 80, 90, 100, 150, 200, 250 or more). These IC18 proteins include variants of SEQ ID NO: 52. Preferred fragments of (b) comprise an epitope from SEQ ID NO: 52. Other preferred fragments lack one or more amino acids (e.g. 1, 2, 3, 4, 5, 6, 7, 8, 9, 10, 15, 20, 25 or more) from the C-terminus and/or one or more amino acids (e.g. 1, 2, 3, 4, 5, 6, 7, 8, 9, 10, 15, 20, 25 or more) from the N-terminus of SEQ ID NO: 52 while retaining at least one epitope of SEQ ID NO: 52. Other fragments omit one or more protein domains. Immunogenic fragments of IC18 are identified in table 1 of reference 82.

[0428] IC19

[0429] IC19 is annotated in reference 82 as a choline-binding protein J (cbpJ). For reference purposes, the amino acid sequence of full length IC19 is SEQ ID NO: 53 herein. The use of IC19 for immunisation is reported in reference 82 (SEQ ID NO: 164 therein).

[0430] Preferred IC19 polypeptides for use with the invention comprise an amino acid sequence: (a) having 50% or more identity (e.g. 60%, 65%, 70%, 75%, 80%, 85%, 90%, 91%, 92%, 93%, 94%, 95%, 96%, 97%, 98%, 99%, 99.5% or more) to SEQ ID NO: 53; and/or (b) comprising a fragment of at least ‘n’ consecutive amino acids of SEQ ID NO: 53, wherein ‘n’ is 7 or more (e.g. 8, 10, 12, 14, 16, 18, 20, 25, 30, 35, 40, 50, 60, 70, 80, 90, 100, 150, 200, 250 or more). These IC19 proteins include variants of SEQ ID NO: 53. Preferred fragments of (b) comprise an epitope from SEQ ID NO: 53. Other preferred fragments lack one or more amino acids (e.g. 1, 2, 3, 4, 5, 6, 7, 8, 9, 10, 15, 20, 25 or more) from the C-terminus and/or one or more amino acids (e.g. 1, 2, 3, 4, 5, 6, 7, 8, 9, 10, 15, 20, 25 or more) from the N-terminus of SEQ ID NO: 53 while retaining at least one epitope of SEQ ID NO: 53. Other fragments omit one or more protein domains. Immunogenic fragments of IC19 are identified in table 1 of reference 82.

[0431] IC20

[0432] IC20 is a choline binding protein G. For reference purposes, the amino acid sequence of full length IC20 is SEQ ID NO: 54 herein. In the R6 genome IC20 is spr0349 [205]. The use of IC20 for immunisation is reported in reference 82 (SEQ ID NO: 165 therein).

[0433] Preferred IC20 polypeptides for use with the invention comprise an amino acid sequence: (a) having 50% or more identity (e.g. 60%, 65%, 70%, 75%, 80%, 85%, 90%, 91%, 92%, 93%, 94%, 95%, 96%, 97%, 98%, 99%, 99.5% or more) to SEQ ID NO: 54; and/or (b) comprising a fragment of at least ‘n’ consecutive amino acids of SEQ ID NO: 54, wherein ‘n’ is 7 or more (e.g. 8, 10, 12, 14, 16, 18, 20, 25, 30, 35, 40, 50, 60, 70, 80, 90, 100, 150, 200, 250 or more). These IC20 proteins include variants of SEQ ID NO: 54. Preferred fragments of (b) comprise an epitope from SEQ ID NO: 54. Other preferred fragments lack one or more amino acids (e.g. 1, 2, 3, 4, 5, 6, 7, 8, 9, 10, 15, 20, 25 or more) from the C-terminus and/or one or more amino acids (e.g. 1, 2, 3, 4, 5, 6, 7, 8, 9, 10, 15, 20, 25 or more) from the N-terminus of SEQ ID NO: 54 while retaining at least one epitope of SEQ ID NO: 54. Other fragments omit one or more protein domains. Immunogenic fragments of IC20 are identified in table 1 of reference 82.

[0434] IC21

[0435] IC21 is annotated in reference 82 as a hypothetical protein. For reference purposes, the amino acid sequence of full length IC21 is SEQ ID NO: 55 herein. In the R6 genome IC21 is spr0410 [205]. The use of IC21 for immunisation is reported in reference 82 (SEQ ID NO: 166 therein).

[0436] Preferred IC21 polypeptides for use with the invention comprise an amino acid sequence: (a) having 50% or more identity (e.g. 60%, 65%, 70%, 75%, 80%, 85%, 90%, 91%, 92%, 93%, 94%, 95%, 96%, 97%, 98%, 99%, 99.5% or more) to SEQ ID NO: 55; and/or (b) comprising a fragment of at least ‘n’ consecutive amino acids of SEQ ID NO: 55, wherein ‘n’ is 7 or more (e.g. 8, 10, 12, 14, 16, 18, 20, 25, 30, 35, 40, 50, 60, 70, 80, 90, 100, 150, 200, 250 or more). These IC21 proteins include variants of SEQ ID NO: 55. Preferred fragments of (b) comprise an epitope from SEQ ID NO: 55. Other preferred fragments lack one or more amino acids (e.g. 1, 2, 3, 4, 5, 6, 7, 8, 9, 10, 15, 20, 25 or more) from the C-terminus and/or one or more amino acids (e.g. 1, 2, 3, 4, 5, 6, 7, 8, 9, 10, 15, 20, 25 or more) from the N-terminus of SEQ ID NO: 55 while retaining at least one epitope of SEQ ID NO: 55. Other fragments omit one or more protein domains. Immunogenic fragments of IC21 are identified in table 1 of reference 82.

[0437] IC22

[0438] IC22 is annotated in reference 82 as cell wall surface anchor family protein. For reference purposes, the amino acid sequence of full length IC22 is SEQ ID NO: 56 herein. In the R6 genome IC22 is spr0051 [205]. The use of IC22 for immunisation is reported in reference 82 (SEQ ID NO: 167 therein).

[0439] Preferred IC22 polypeptides for use with the invention comprise an amino acid sequence: (a) having 50% or more identity (e.g. 60%, 65%, 70%, 75%, 80%, 85%, 90%, 91%, 92%, 93%, 94%, 95%, 96%, 97%, 98%, 99%, 99.5% or more) to SEQ ID NO: 56; and/or (b) comprising a fragment of at least ‘n’ consecutive amino acids of SEQ ID NO: 56, wherein ‘n’ is 7 or more (e.g. 8, 10, 12, 14, 16, 18, 20, 25, 30, 35, 40, 50, 60, 70, 80, 90, 100, 150, 200, 250 or more). These IC22 proteins include variants of SEQ ID NO: 56. Preferred fragments of (b) comprise an epitope from SEQ ID NO: 56. Other preferred fragments lack one or more amino acids (e.g. 1, 2, 3, 4, 5, 6, 7, 8, 9, 10, 15, 20, 25 or more) from the C-terminus and/or one or more amino acids (e.g. 1, 2, 3, 4, 5, 6, 7, 8, 9, 10, 15, 20, 25 or more) from the N-terminus of SEQ ID NO: 56 while retaining at least one epitope of SEQ ID NO: 56. Other fragments omit one or more protein domains. Immunogenic fragments of IC22 are identified in table 1 of reference 82.

[0440] IC23

[0441] IC23 is a Sortase (cf. spr1098). For reference purposes, the amino acid sequence of full length IC23 is SEQ ID NO: 57 herein. The use of IC23 for immunisation is reported in reference 82 (SEQ ID NO: 168 therein).

[0442] Preferred IC23 polypeptides for use with the invention comprise an amino acid sequence: (a) having 50% or more identity (e.g. 60%, 65%, 70%, 75%, 80%, 85%, 90%, 91%, 92%, 93%, 94%, 95%, 96%, 97%, 98%, 99%, 99.5% or more) to SEQ ID NO: 57; and/or (b) comprising a fragment of at least ‘n’ consecutive amino acids of SEQ ID NO: 57, wherein ‘n’ is 7 or more (e.g. 8, 10, 12, 14, 16, 18, 20, 25, 30, 35, 40, 50, 60, 70, 80, 90, 100, 150, 200, 250 or more). These IC23 proteins include variants of SEQ ID NO: 57. Preferred fragments of (b) comprise an epitope from SEQ ID NO: 57. Other preferred fragments lack one or more amino acids (e.g. 1, 2, 3, 4, 5, 6, 7, 8, 9, 10, 15, 20, 25 or more) from the C-terminus and/or one or more amino acids (e.g. 1, 2, 3, 4, 5, 6, 7, 8, 9, 10, 15, 20, 25 or more) from the N-terminus of SEQ ID NO: 57 while retaining at least one epitope of SEQ ID NO: 57. Other fragments omit one or more protein domains. Immunogenic fragments of IC23 are identified in table 1 of reference 82.

[0443] IC24

[0444] IC24 is a Sortase (cf. spr1098). For reference purposes, the amino acid sequence of full length IC24 is SEQ ID NO: 58 herein. The use of IC24 for immunisation is reported in reference 82 (SEQ ID NO: 169 therein).

[0445] Preferred IC24 polypeptides for use with the invention comprise an amino acid sequence: (a) having 50% or more identity (e.g. 60%, 65%, 70%, 75%, 80%, 85%, 90%, 91%, 92%, 93%, 94%, 95%, 96%, 97%, 98%, 99%, 99.5% or more) to SEQ ID NO: 58; and/or (b) comprising a fragment of at least ‘n’ consecutive amino acids of SEQ ID NO: 58, wherein ‘n’ is 7 or more (e.g. 8, 10, 12, 14, 16, 18, 20, 25, 30, 35, 40, 50, 60, 70, 80, 90, 100, 150, 200, 250 or more). These IC24 proteins include variants of SEQ ID NO: 58. Preferred fragments of (b) comprise an epitope from SEQ ID NO: 58. Other preferred fragments lack one or more amino acids (e.g. 1, 2, 3, 4, 5, 6, 7, 8, 9, 10, 15, 20, 25 or more) from the C-terminus and/or one or more amino acids (e.g. 1, 2, 3, 4, 5, 6, 7, 8, 9, 10, 15, 20, 25 or more) from the N-terminus of SEQ ID NO: 58 while retaining at least one epitope of SEQ ID NO: 58. Other fragments omit one or more protein domains. Immunogenic fragments of IC24 are identified in table 1 of reference 82.

[0446] IC25

[0447] IC25 is annotated in reference 82 as a putative endo-P-N-acetylglucosaminidase. For reference purposes, the amino acid sequence of full length IC25 is SEQ ID NO: 59 herein. In the R6 genome IC25 is spr0440 [205]. The use of IC25 for immunisation is reported in reference 82 (SEQ ID NO: 170 therein).

[0448] Preferred IC25 polypeptides for use with the invention comprise an amino acid sequence: (a) having 50% or more identity (e.g. 60%, 65%, 70%, 75%, 80%, 85%, 90%, 91%, 92%, 93%, 94%, 95%, 96%, 97%, 98%, 99%, 99.5% or more) to SEQ ID NO: 59; and/or (b) comprising a fragment of at least ‘n’ consecutive amino acids of SEQ ID NO: 59, wherein ‘n’ is 7 or more (e.g. 8, 10, 12, 14, 16, 18, 20, 25, 30, 35, 40, 50, 60, 70, 80, 90, 100, 150, 200, 250 or more). These IC25 proteins include variants of SEQ ID NO: 59. Preferred fragments of (b) comprise an epitope from SEQ ID NO: 59. Other preferred fragments lack one or more amino acids (e.g. 1, 2, 3, 4, 5, 6, 7, 8, 9, 10, 15, 20, 25 or more) from the C-terminus and/or one or more amino acids (e.g. 1, 2, 3, 4, 5, 6, 7, 8, 9, 10, 15, 20, 25 or more) from the N-terminus of SEQ ID NO: 59 while retaining at least one epitope of SEQ ID NO: 59. Other fragments omit one or more protein domains. Immunogenic fragments of IC25 are identified in table 1 of reference 82.

[0449] IC26

[0450] IC26 is a EcoE type I restriction modification enzyme. For reference purposes, the amino acid sequence of full length IC26 is SEQ ID NO: 60 herein. In the R6 genome IC26 is spr0449 [205]. The use of IC26 for immunisation is reported in reference 82 (SEQ ID NO: 171 therein).

[0451] Preferred IC26 polypeptides for use with the invention comprise an amino acid sequence: (a) having 50% or more identity (e.g. 60%, 65%, 70%, 75%, 80%, 85%, 90%, 91%, 92%, 93%, 94%, 95%, 96%, 97%, 98%, 99%, 99.5% or more) to SEQ ID NO: 60; and/or (b) comprising a fragment of at least ‘n’ consecutive amino acids of SEQ ID NO: 60, wherein ‘n’ is 7 or more (e.g. 8, 10, 12, 14, 16, 18, 20, 25, 30, 35, 40, 50, 60, 70, 80, 90, 100, 150, 200, 250 or more). These IC26 proteins include variants of SEQ ID NO: 60. Preferred fragments of (b) comprise an epitope from SEQ ID NO: 60. Other preferred fragments lack one or more amino acids (e.g. 1, 2, 3, 4, 5, 6, 7, 8, 9, 10, 15, 20, 25 or more) from the C-terminus and/or one or more amino acids (e.g. 1, 2, 3, 4, 5, 6, 7, 8, 9, 10, 15, 20, 25 or more) from the N-terminus of SEQ ID NO: 60 while retaining at least one epitope of SEQ ID NO: 60. Other fragments omit one or more protein domains. Immunogenic fragments of IC26 are identified in table 1 of reference 82.

[0452] IC27

[0453] IC27 is annotated in reference 82 as dnaJ protein. For reference purposes, the amino acid sequence of full length IC27 is SEQ ID NO: 61 herein. In the R6 genome IC27 is spr0456 [205]. The use of IC27 for immunisation is reported in reference 82 (SEQ ID NO: 172 therein).

[0454] Preferred IC27 polypeptides for use with the invention comprise an amino acid sequence: (a) having 50% or more identity (e.g. 60%, 65%, 70%, 75%, 80%, 85%, 90%, 91%, 92%, 93%, 94%, 95%, 96%, 97%, 98%, 99%, 99.5% or more) to SEQ ID NO: 61; and/or (b) comprising a fragment of at least ‘n’ consecutive amino acids of SEQ ID NO: 61, wherein ‘n’ is 7 or more (e.g. 8, 10, 12, 14, 16, 18, 20, 25, 30, 35, 40, 50, 60, 70, 80, 90, 100, 150, 200, 250 or more). These IC27 proteins include variants of SEQ ID NO: 61. Preferred fragments of (b) comprise an epitope from SEQ ID NO: 61. Other preferred fragments lack one or more amino acids (e.g. 1, 2, 3, 4, 5, 6, 7, 8, 9, 10, 15, 20, 25 or more) from the C-terminus and/or one or more amino acids (e.g. 1, 2, 3, 4, 5, 6, 7, 8, 9, 10, 15, 20, 25 or more) from the N-terminus of SEQ ID NO: 61 while retaining at least one epitope of SEQ ID NO: 61. Other fragments omit one or more protein domains. Immunogenic fragments of IC27 are identified in table 1 of reference 82.

[0455] IC28

[0456] IC28 is annotated in reference 82 as a BlpC ABC transporter (blpB). For reference purposes, the amino acid sequence of full length IC28 is SEQ ID NO: 62 herein. In the R6 genome IC28 is spr0466 [205]. The use of IC28 for immunisation is reported in reference 82 (SEQ ID NO: 173 therein).

[0457] Preferred IC28 polypeptides for use with the invention comprise an amino acid sequence: (a) having 50% or more identity (e.g. 60%, 65%, 70%, 75%, 80%, 85%, 90%, 91%, 92%, 93%, 94%, 95%, 96%, 97%, 98%, 99%, 99.5% or more) to SEQ ID NO: 62; and/or (b) comprising a fragment of at least ‘n’ consecutive amino acids of SEQ ID NO: 62, wherein ‘n’ is 7 or more (e.g. 8, 10, 12, 14, 16, 18, 20, 25, 30, 35, 40, 50, 60, 70, 80, 90, 100, 150, 200, 250 or more). These IC28 proteins include variants of SEQ ID NO: 62. Preferred fragments of (b) comprise an epitope from SEQ ID NO: 62. Other preferred fragments lack one or more amino acids (e.g. 1, 2, 3, 4, 5, 6, 7, 8, 9, 10, 15, 20, 25 or more) from the C-terminus and/or one or more amino acids (e.g. 1, 2, 3, 4, 5, 6, 7, 8, 9, 10, 15, 20, 25 or more) from the N-terminus of SEQ ID NO: 62 while retaining at least one epitope of SEQ ID NO: 62. Other fragments omit one or more protein domains. Immunogenic fragments of IC28 are identified in table 1 of reference 82.

[0458] IC29

[0459] IC29 is annotated in reference 82 as a hypothetical protein. For reference purposes, the amino acid sequence of full length IC29 is SEQ ID NO: 63 herein. In the R6 genome IC29 is spr0488 [205]. The use of IC29 for immunisation is reported in reference 82 (SEQ ID NO: 174 therein).

[0460] Preferred IC29 polypeptides for use with the invention comprise an amino acid sequence: (a) having 50% or more identity (e.g. 60%, 65%, 70%, 75%, 80%, 85%, 90%, 91%, 92%, 93%, 94%, 95%, 96%, 97%, 98%, 99%, 99.5% or more) to SEQ ID NO: 63; and/or (b) comprising a fragment of at least ‘n’ consecutive amino acids of SEQ ID NO: 63, wherein ‘n’ is 7 or more (e.g. 8, 10, 12, 14, 16, 18, 20, 25, 30, 35, 40, 50, 60, 70, 80, 90, 100, 150, 200, 250 or more). These IC29 proteins include variants of SEQ ID NO: 63. Preferred fragments of (b) comprise an epitope from SEQ ID NO: 63. Other preferred fragments lack one or more amino acids (e.g. 1, 2, 3, 4, 5, 6, 7, 8, 9, 10, 15, 20, 25 or more) from the C-terminus and/or one or more amino acids (e.g. 1, 2, 3, 4, 5, 6, 7, 8, 9, 10, 15, 20, 25 or more) from the N-terminus of SEQ ID NO: 63 while retaining at least one epitope of SEQ ID NO: 63. Other fragments omit one or more protein domains. Immunogenic fragments of IC29 are identified in table 1 of reference 82.

[0461] IC30

[0462] IC30 is a ABC transporter substrate-binding protein. For reference purposes, the amino acid sequence of full length IC30 is SEQ ID NO: 64 herein. In the R6 genome IC30 is spr0534 [205]. The use of IC30 for immunisation is reported in reference 82 (SEQ ID NO: 175 therein).

[0463] Preferred IC30 polypeptides for use with the invention comprise an amino acid sequence: (a) having 50% or more identity (e.g. 60%, 65%, 70%, 75%, 80%, 85%, 90%, 91%, 92%, 93%, 94%, 95%, 96%, 97%, 98%, 99%, 99.5% or more) to SEQ ID NO: 64; and/or (b) comprising a fragment of at least ‘n’ consecutive amino acids of SEQ ID NO: 64, wherein ‘n’ is 7 or more (e.g. 8, 10, 12, 14, 16, 18, 20, 25, 30, 35, 40, 50, 60, 70, 80, 90, 100, 150, 200, 250 or more). These IC30 proteins include variants of SEQ ID NO: 64. Preferred fragments of (b) comprise an epitope from SEQ ID NO: 64. Other preferred fragments lack one or more amino acids (e.g. 1, 2, 3, 4, 5, 6, 7, 8, 9, 10, 15, 20, 25 or more) from the C-terminus and/or one or more amino acids (e.g. 1, 2, 3, 4, 5, 6, 7, 8, 9, 10, 15, 20, 25 or more) from the N-terminus of SEQ ID NO: 64 while retaining at least one epitope of SEQ ID NO: 64. Other fragments omit one or more protein domains. Immunogenic fragments of IC30 are identified in table 1 of reference 82.

[0464] IC31

[0465] IC31 is annotated in reference 82 as a metallo-P-lactamase superfamily protein. For reference purposes, the amino acid sequence of full length IC31 is SEQ ID NO: 65 herein. In the R6 genome IC31 is spr0538 [205]. The use of IC31 for immunisation is reported in reference 82 (SEQ ID NO: 176 therein).

[0466] Preferred IC31 polypeptides for use with the invention comprise an amino acid sequence: (a) having 50% or more identity (e.g. 60%, 65%, 70%, 75%, 80%, 85%, 90%, 91%, 92%, 93%, 94%, 95%, 96%, 97%, 98%, 99%, 99.5% or more) to SEQ ID NO: 65; and/or (b) comprising a fragment of at least ‘n’ consecutive amino acids of SEQ ID NO: 65, wherein ‘n’ is 7 or more (e.g. 8, 10, 12, 14, 16, 18, 20, 25, 30, 35, 40, 50, 60, 70, 80, 90, 100, 150, 200, 250 or more). These IC31 proteins include variants of SEQ ID NO: 65. Preferred fragments of (b) comprise an epitope from SEQ ID NO: 65. Other preferred fragments lack one or more amino acids (e.g. 1, 2, 3, 4, 5, 6, 7, 8, 9, 10, 15, 20, 25 or more) from the C-terminus and/or one or more amino acids (e.g. 1, 2, 3, 4, 5, 6, 7, 8, 9, 10, 15, 20, 25 or more) from the N-terminus of SEQ ID NO: 65 while retaining at least one epitope of SEQ ID NO: 65. Other fragments omit one or more protein domains. Immunogenic fragments of IC31 are identified in table 1 of reference 82.

[0467] IC32

[0468] IC32 is a variant form of spr0565, as mentioned above (SEQ ID NO: 66 herein). Useful IC32 polypeptides may comprise an amino acid sequence: (a) having 50% or more identity (e.g. 60%, 65%, 70%, 75%, 80%, 85%, 90%, 91%, 92%, 93%, 94%, 95%, 96%, 97%, 98%, 99%, 99.5% or more) to SEQ ID NO: 66; and/or (b) comprising a fragment of at least ‘n’ consecutive amino acids of SEQ ID NO: 66, wherein ‘n’ is 7 or more (e.g. 8, 10, 12, 14, 16, 18, 20, 25, 30, 35, 40, 50, 60, 70, 80, 90, 100, 150, 200, 250 or more). These IC32 polypeptides include variants of SEQ ID NO: 66. Preferred fragments of (b) comprise an epitope from SEQ ID NO: 66. Other preferred fragments lack one or more amino acids (e.g. 1, 2, 3, 4, 5, 6, 7, 8, 9, 10, 15, 20, 25 or more) from the C-terminus and/or one or more amino acids (e.g. 1, 2, 3, 4, 5, 6, 7, 8, 9, 10, 15, 20, 25 or more) from the N-terminus of SEQ ID NO: 66 while retaining at least one epitope of SEQ ID NO: 66. Other fragments omit one or more protein domains. Immunogenic fragments of SEQ ID NO: 66 are identified in table 1 of reference 82.

[0469] IC33

[0470] IC33 is annotated in reference 82 as a putative pneumococcal surface protein. For reference purposes, the amino acid sequence of full length IC33 is SEQ ID NO: 67 herein. In the R6 genome IC33 is spr0583 [205]. The use of IC33 for immunisation is reported in reference 82 (SEQ ID NO: 180 therein) and it is shown to be protective in reference 114 (antigen SP0667).

[0471] Preferred IC33 polypeptides for use with the invention comprise an amino acid sequence: (a) having 50% or more identity (e.g. 60%, 65%, 70%, 75%, 80%, 85%, 90%, 91%, 92%, 93%, 94%, 95%, 96%, 97%, 98%, 99%, 99.5% or more) to SEQ ID NO: 67; and/or (b) comprising a fragment of at least ‘n’ consecutive amino acids of SEQ ID NO: 67, wherein ‘n’ is 7 or more (e.g. 8, 10, 12, 14, 16, 18, 20, 25, 30, 35, 40, 50, 60, 70, 80, 90, 100, 150, 200, 250 or more). These IC33 proteins include variants of SEQ ID NO: 67. Preferred fragments of (b) comprise an epitope from SEQ ID NO: 67. Other preferred fragments lack one or more amino acids (e.g. 1, 2, 3, 4, 5, 6, 7, 8, 9, 10, 15, 20, 25 or more) from the C-terminus and/or one or more amino acids (e.g. 1, 2, 3, 4, 5, 6, 7, 8, 9, 10, 15, 20, 25 or more) from the N-terminus of SEQ ID NO: 67 while retaining at least one epitope of SEQ ID NO: 67. Other fragments omit one or more protein domains. Immunogenic fragments of IC33 are identified in table 1 of reference 82.

[0472] IC34

[0473] IC34 is a UDP-N-acetylmuramoyl-L-alanyl-D-glutamate synthetase. For reference purposes, the amino acid sequence of full length IC34 is SEQ ID NO: 68 herein. In the R6 genome IC34 is spr0603 [205]. The use of IC34 for immunisation is reported in reference 82 (SEQ ID NO: 181 therein).

[0474] Preferred IC34 polypeptides for use with the invention comprise an amino acid sequence: (a) having 50% or more identity (e.g. 60%, 65%, 70%, 75%, 80%, 85%, 90%, 91%, 92%, 93%, 94%, 95%, 96%, 97%, 98%, 99%, 99.5% or more) to SEQ ID NO: 68; and/or (b) comprising a fragment of at least ‘n’ consecutive amino acids of SEQ ID NO: 68, wherein ‘n’ is 7 or more (e.g. 8, 10, 12, 14, 16, 18, 20, 25, 30, 35, 40, 50, 60, 70, 80, 90, 100, 150, 200, 250 or more). These IC34 proteins include variants of SEQ ID NO: 68. Preferred fragments of (b) comprise an epitope from SEQ ID NO: 68. Other preferred fragments lack one or more amino acids (e.g. 1, 2, 3, 4, 5, 6, 7, 8, 9, 10, 15, 20, 25 or more) from the C-terminus and/or one or more amino acids (e.g. 1, 2, 3, 4, 5, 6, 7, 8, 9, 10, 15, 20, 25 or more) from the N-terminus of SEQ ID NO: 68 while retaining at least one epitope of SEQ ID NO: 68. Other fragments omit one or more protein domains. Immunogenic fragments of IC34 are identified in table 1 of reference 82.

[0475] IC35

[0476] IC35 is a ABC transporter substrate-binding protein. For reference purposes, the amino acid sequence of full length IC35 is SEQ ID NO: 69 herein. In the R6 genome IC35 is spr0659 [205]. The use of IC35 for immunisation is reported in reference 82 (SEQ ID NO: 182 therein).

[0477] Preferred IC35 polypeptides for use with the invention comprise an amino acid sequence: (a) having 50% or more identity (e.g. 60%, 65%, 70%, 75%, 80%, 85%, 90%, 91%, 92%, 93%, 94%, 95%, 96%, 97%, 98%, 99%, 99.5% or more) to SEQ ID NO: 69; and/or (b) comprising a fragment of at least ‘n’ consecutive amino acids of SEQ ID NO: 69, wherein ‘n’ is 7 or more (e.g. 8, 10, 12, 14, 16, 18, 20, 25, 30, 35, 40, 50, 60, 70, 80, 90, 100, 150, 200, 250 or more). These IC35 proteins include variants of SEQ ID NO: 69. Preferred fragments of (b) comprise an epitope from SEQ ID NO: 69. Other preferred fragments lack one or more amino acids (e.g. 1, 2, 3, 4, 5, 6, 7, 8, 9, 10, 15, 20, 25 or more) from the C-terminus and/or one or more amino acids (e.g. 1, 2, 3, 4, 5, 6, 7, 8, 9, 10, 15, 20, 25 or more) from the N-terminus of SEQ ID NO: 69 while retaining at least one epitope of SEQ ID NO: 69. Other fragments omit one or more protein domains. Immunogenic fragments of IC35 are identified in table 1 of reference 82.

[0478] IC36

[0479] IC36 is a ABC transporter ATP-binding protein. For reference purposes, the amino acid sequence of full length IC36 is SEQ ID NO: 70 herein. In the R6 genome IC36 is spr0678 [205]. The use of IC36 for immunisation is reported in reference 82 (SEQ ID NO: 183 therein).

[0480] Preferred IC36 polypeptides for use with the invention comprise an amino acid sequence: (a) having 50% or more identity (e.g. 60%, 65%, 70%, 75%, 80%, 85%, 90%, 91%, 92%, 93%, 94%, 95%, 96%, 97%, 98%, 99%, 99.5% or more) to SEQ ID NO: 70; and/or (b) comprising a fragment of at least ‘n’ consecutive amino acids of SEQ ID NO: 70, wherein ‘n’ is 7 or more (e.g. 8, 10, 12, 14, 16, 18, 20, 25, 30, 35, 40, 50, 60, 70, 80, 90, 100, 150, 200, 250 or more). These IC36 proteins include variants of SEQ ID NO: 70. Preferred fragments of (b) comprise an epitope from SEQ ID NO: 70. Other preferred fragments lack one or more amino acids (e.g. 1, 2, 3, 4, 5, 6, 7, 8, 9, 10, 15, 20, 25 or more) from the C-terminus and/or one or more amino acids (e.g. 1, 2, 3, 4, 5, 6, 7, 8, 9, 10, 15, 20, 25 or more) from the N-terminus of SEQ ID NO: 70 while retaining at least one epitope of SEQ ID NO: 70. Other fragments omit one or more protein domains. Immunogenic fragments of IC36 are identified in table 1 of reference 82.

[0481] IC37

[0482] IC37 is annotated in reference 82 as a hypothetical protein. For reference purposes, the amino acid sequence of full length IC37 is SEQ ID NO: 71 herein. In the R6 genome IC37 is spr0693 [205]. The use of IC37 for immunisation is reported in reference 82 (SEQ ID NO: 184 therein).

[0483] Preferred IC37 polypeptides for use with the invention comprise an amino acid sequence: (a) having 50% or more identity (e.g. 60%, 65%, 70%, 75%, 80%, 85%, 90%, 91%, 92%, 93%, 94%, 95%, 96%, 97%, 98%, 99%, 99.5% or more) to SEQ ID NO: 71; and/or (b) comprising a fragment of at least ‘n’ consecutive amino acids of SEQ ID NO: 71, wherein ‘n’ is 7 or more (e.g. 8, 10, 12, 14, 16, 18, 20, 25, 30, 35, 40, 50, 60, 70, 80, 90, 100, 150, 200, 250 or more). These IC37 proteins include variants of SEQ ID NO: 71. Preferred fragments of (b) comprise an epitope from SEQ ID NO: 71. Other preferred fragments lack one or more amino acids (e.g. 1, 2, 3, 4, 5, 6, 7, 8, 9, 10, 15, 20, 25 or more) from the C-terminus and/or one or more amino acids (e.g. 1, 2, 3, 4, 5, 6, 7, 8, 9, 10, 15, 20, 25 or more) from the N-terminus of SEQ ID NO: 71 while retaining at least one epitope of SEQ ID NO: 71. Other fragments omit one or more protein domains. Immunogenic fragments of IC37 are identified in table 1 of reference 82.

[0484] IC38

[0485] IC38 is annotated in reference 82 as a nodulin-related protein with truncation. For reference purposes, the amino acid sequence of full length IC38 is SEQ ID NO: 72 herein. In the R6 genome IC38 is spr0814 [205]. The use of IC38 for immunisation is reported in reference 82 (SEQ ID NO: 185 therein).

[0486] Preferred IC38 polypeptides for use with the invention comprise an amino acid sequence: (a) having 50% or more identity (e.g. 60%, 65%, 70%, 75%, 80%, 85%, 90%, 91%, 92%, 93%, 94%, 95%, 96%, 97%, 98%, 99%, 99.5% or more) to SEQ ID NO: 72; and/or (b) comprising a fragment of at least ‘n’ consecutive amino acids of SEQ ID NO: 72, wherein ‘n’ is 7 or more (e.g. 8, 10, 12, 14, 16, 18, 20, 25, 30, 35, 40, 50, 60, 70, 80, 90, 100, 150, 200, 250 or more). These IC38 proteins include variants of SEQ ID NO: 72. Preferred fragments of (b) comprise an epitope from SEQ ID NO: 72. Other preferred fragments lack one or more amino acids (e.g. 1, 2, 3, 4, 5, 6, 7, 8, 9, 10, 15, 20, 25 or more) from the C-terminus and/or one or more amino acids (e.g. 1, 2, 3, 4, 5, 6, 7, 8, 9, 10, 15, 20, 25 or more) from the N-terminus of SEQ ID NO: 72 while retaining at least one epitope of SEQ ID NO: 72. Other fragments omit one or more protein domains. Immunogenic fragments of IC38 are identified in table 1 of reference 82.

[0487] IC39

[0488] IC39 is a Teichoic acid phosphorylcholine esterase/choline binding protein E (cbpE). It may also be known as ‘LytD’. For reference purposes, the amino acid sequence of full length IC39 is SEQ ID NO: 73 herein. In the R6 genome IC39 is spr0831 [205]. The use of IC39 for immunisation is reported in reference 82 (SEQ ID NO: 186 therein).

[0489] Preferred IC39 polypeptides for use with the invention comprise an amino acid sequence: (a) having 50% or more identity (e.g. 60%, 65%, 70%, 75%, 80%, 85%, 90%, 91%, 92%, 93%, 94%, 95%, 96%, 97%, 98%, 99%, 99.5% or more) to SEQ ID NO: 73; and/or (b) comprising a fragment of at least ‘n’ consecutive amino acids of SEQ ID NO: 73, wherein ‘n’ is 7 or more (e.g. 8, 10, 12, 14, 16, 18, 20, 25, 30, 35, 40, 50, 60, 70, 80, 90, 100, 150, 200, 250 or more). These IC39 proteins include variants of SEQ ID NO: 73. Preferred fragments of (b) comprise an epitope from SEQ ID NO: 73. Other preferred fragments lack one or more amino acids (e.g. 1, 2, 3, 4, 5, 6, 7, 8, 9, 10, 15, 20, 25 or more) from the C-terminus and/or one or more amino acids (e.g. 1, 2, 3, 4, 5, 6, 7, 8, 9, 10, 15, 20, 25 or more) from the N-terminus of SEQ ID NO: 73 while retaining at least one epitope of SEQ ID NO: 73. Other fragments omit one or more protein domains. Immunogenic fragments of IC39 are identified in table 1 of reference 82.

[0490] IC40

[0491] IC40 is a glucose-inhibited division protein A. For reference purposes, the amino acid sequence of full length IC40 is SEQ ID NO: 74 herein. In the R6 genome IC40 is spr0844 [205]. The use of IC40 for immunisation is reported in reference 82 (SEQ ID NO: 187 therein).

[0492] Preferred IC40 polypeptides for use with the invention comprise an amino acid sequence: (a) having 50% or more identity (e.g. 60%, 65%, 70%, 75%, 80%, 85%, 90%, 91%, 92%, 93%, 94%, 95%, 96%, 97%, 98%, 99%, 99.5% or more) to SEQ ID NO: 74; and/or (b) comprising a fragment of at least ‘n’ consecutive amino acids of SEQ ID NO: 74, wherein ‘n’ is 7 or more (e.g. 8, 10, 12, 14, 16, 18, 20, 25, 30, 35, 40, 50, 60, 70, 80, 90, 100, 150, 200, 250 or more). These IC40 proteins include variants of SEQ ID NO: 74. Preferred fragments of (b) comprise an epitope from SEQ ID NO: 74. Other preferred fragments lack one or more amino acids (e.g. 1, 2, 3, 4, 5, 6, 7, 8, 9, 10, 15, 20, 25 or more) from the C-terminus and/or one or more amino acids (e.g. 1, 2, 3, 4, 5, 6, 7, 8, 9, 10, 15, 20, 25 or more) from the N-terminus of SEQ ID NO: 74 while retaining at least one epitope of SEQ ID NO: 74. Other fragments omit one or more protein domains. Immunogenic fragments of IC40 are identified in table 1 of reference 82.

[0493] IC41

[0494] IC41 is a Alanine dehydrogenase, truncation. For reference purposes, the amino acid sequence of full length IC41 is SEQ ID NO: 75 herein. In the R6 genome IC41 is spr0854 [205]. The use of IC41 for immunisation is reported in reference 82 (SEQ ID NO: 188 therein).

[0495] Preferred IC41 polypeptides for use with the invention comprise an amino acid sequence: (a) having 50% or more identity (e.g. 60%, 65%, 70%, 75%, 80%, 85%, 90%, 91%, 92%, 93%, 94%, 95%, 96%, 97%, 98%, 99%, 99.5% or more) to SEQ ID NO: 75; and/or (b) comprising a fragment of at least ‘n’ consecutive amino acids of SEQ ID NO: 75, wherein ‘n’ is 7 or more (e.g. 8, 10, 12, 14, 16, 18, 20, 25, 30, 35, 40, 50, 60, 70, 80, 90, 100, 150, 200, 250 or more). These IC41 proteins include variants of SEQ ID NO: 75. Preferred fragments of (b) comprise an epitope from SEQ ID NO: 75. Other preferred fragments lack one or more amino acids (e.g. 1, 2, 3, 4, 5, 6, 7, 8, 9, 10, 15, 20, 25 or more) from the C-terminus and/or one or more amino acids (e.g. 1, 2, 3, 4, 5, 6, 7, 8, 9, 10, 15, 20, 25 or more) from the N-terminus of SEQ ID NO: 75 while retaining at least one epitope of SEQ ID NO: 75. Other fragments omit one or more protein domains. Immunogenic fragments of IC41 are identified in table 1 of reference 82.

[0496] IC42

[0497] IC42 is a glycogen syntase. For reference purposes, the amino acid sequence of full length IC42 is SEQ ID NO: 76 herein. In the R6 genome IC42 is spr1032 [205]. The use of IC42 for immunisation is reported in reference 82 (SEQ ID NO: 191 therein).

[0498] Preferred IC42 polypeptides for use with the invention comprise an amino acid sequence: (a) having 50% or more identity (e.g. 60%, 65%, 70%, 75%, 80%, 85%, 90%, 91%, 92%, 93%, 94%, 95%, 96%, 97%, 98%, 99%, 99.5% or more) to SEQ ID NO: 76; and/or (b) comprising a fragment of at least ‘n’ consecutive amino acids of SEQ ID NO: 76, wherein ‘n’ is 7 or more (e.g. 8, 10, 12, 14, 16, 18, 20, 25, 30, 35, 40, 50, 60, 70, 80, 90, 100, 150, 200, 250 or more). These IC42 proteins include variants of SEQ ID NO: 76. Preferred fragments of (b) comprise an epitope from SEQ ID NO: 76. Other preferred fragments lack one or more amino acids (e.g. 1, 2, 3, 4, 5, 6, 7, 8, 9, 10, 15, 20, 25 or more) from the C-terminus and/or one or more amino acids (e.g. 1, 2, 3, 4, 5, 6, 7, 8, 9, 10, 15, 20, 25 or more) from the N-terminus of SEQ ID NO: 76 while retaining at least one epitope of SEQ ID NO: 76. Other fragments omit one or more protein domains. Immunogenic fragments of IC42 are identified in table 1 of reference 82.

[0499] IC43

[0500] IC43 is a Immunoglobulin Al protease. For reference purposes, the amino acid sequence of full length IC43 is SEQ ID NO: 77 herein. The use of IC43 for immunisation is reported in reference 82 (SEQ ID NO: 192 therein).

[0501] Preferred IC43 polypeptides for use with the invention comprise an amino acid sequence: (a) having 50% or more identity (e.g. 60%, 65%, 70%, 75%, 80%, 85%, 90%, 91%, 92%, 93%, 94%, 95%, 96%, 97%, 98%, 99%, 99.5% or more) to SEQ ID NO: 77; and/or (b) comprising a fragment of at least ‘n’ consecutive amino acids of SEQ ID NO: 77, wherein ‘n’ is 7 or more (e.g. 8, 10, 12, 14, 16, 18, 20, 25, 30, 35, 40, 50, 60, 70, 80, 90, 100, 150, 200, 250 or more). These IC43 proteins include variants of SEQ ID NO: 77. Preferred fragments of (b) comprise an epitope from SEQ ID NO: 77. Other preferred fragments lack one or more amino acids (e.g. 1, 2, 3, 4, 5, 6, 7, 8, 9, 10, 15, 20, 25 or more) from the C-terminus and/or one or more amino acids (e.g. 1, 2, 3, 4, 5, 6, 7, 8, 9, 10, 15, 20, 25 or more) from the N-terminus of SEQ ID NO: 77 while retaining at least one epitope of SEQ ID NO: 77. Other fragments omit one or more protein domains. Immunogenic fragments of IC43 are identified in table 1 of reference 82.

[0502] IC44

[0503] IC44 is a Uncharacterized restriction enzyme. For reference purposes, the amino acid sequence of full length IC44 is SEQ ID NO: 78 herein. In the R6 genome IC44 is spr1101 [205]. The use of IC44 for immunisation is reported in reference 82 (SEQ ID NO: 195 therein).

[0504] Preferred IC44 polypeptides for use with the invention comprise an amino acid sequence: (a) having 50% or more identity (e.g. 60%, 65%, 70%, 75%, 80%, 85%, 90%, 91%, 92%, 93%, 94%, 95%, 96%, 97%, 98%, 99%, 99.5% or more) to SEQ ID NO: 78; and/or (b) comprising a fragment of at least ‘n’ consecutive amino acids of SEQ ID NO: 78, wherein ‘n’ is 7 or more (e.g. 8, 10, 12, 14, 16, 18, 20, 25, 30, 35, 40, 50, 60, 70, 80, 90, 100, 150, 200, 250 or more). These IC44 proteins include variants of SEQ ID NO: 78. Preferred fragments of (b) comprise an epitope from SEQ ID NO: 78. Other preferred fragments lack one or more amino acids (e.g. 1, 2, 3, 4, 5, 6, 7, 8, 9, 10, 15, 20, 25 or more) from the C-terminus and/or one or more amino acids (e.g. 1, 2, 3, 4, 5, 6, 7, 8, 9, 10, 15, 20, 25 or more) from the N-terminus of SEQ ID NO: 78 while retaining at least one epitope of SEQ ID NO: 78. Other fragments omit one or more protein domains. Immunogenic fragments of IC44 are identified in table 1 of reference 82.

[0505] IC45

[0506] IC45 is a Response regulator. For reference purposes, the amino acid sequence of full length IC45 is SEQ ID NO: 79 herein. In the R6 genome IC45 is spr1107 [205]. The use of IC45 for immunisation is reported in reference 82 (SEQ ID NO: 196 therein).

[0507] Preferred IC45 polypeptides for use with the invention comprise an amino acid sequence: (a) having 50% or more identity (e.g. 60%, 65%, 70%, 75%, 80%, 85%, 90%, 91%, 92%, 93%, 94%, 95%, 96%, 97%, 98%, 99%, 99.5% or more) to SEQ ID NO: 79; and/or (b) comprising a fragment of at least ‘n’ consecutive amino acids of SEQ ID NO: 79, wherein ‘n’ is 7 or more (e.g. 8, 10, 12, 14, 16, 18, 20, 25, 30, 35, 40, 50, 60, 70, 80, 90, 100, 150, 200, 250 or more). These IC45 proteins include variants of SEQ ID NO: 79. Preferred fragments of (b) comprise an epitope from SEQ ID NO: 79. Other preferred fragments lack one or more amino acids (e.g. 1, 2, 3, 4, 5, 6, 7, 8, 9, 10, 15, 20, 25 or more) from the C-terminus and/or one or more amino acids (e.g. 1, 2, 3, 4, 5, 6, 7, 8, 9, 10, 15, 20, 25 or more) from the N-terminus of SEQ ID NO: 79 while retaining at least one epitope of SEQ ID NO: 79. Other fragments omit one or more protein domains. Immunogenic fragments of IC45 are identified in table 1 of reference 82.

[0508] IC46

[0509] IC46 is a ABC transporter membrane spanning permease. For reference purposes, the amino acid sequence of full length IC46 is SEQ ID NO: 80 herein. In the R6 genome IC46 is spr1120 [205]. The use of IC46 for immunisation is reported in reference 82 (SEQ ID NO: 197 therein).

[0510] Preferred IC46 polypeptides for use with the invention comprise an amino acid sequence: (a) having 50% or more identity (e.g. 60%, 65%, 70%, 75%, 80%, 85%, 90%, 91%, 92%, 93%, 94%, 95%, 96%, 97%, 98%, 99%, 99.5% or more) to SEQ ID NO: 80; and/or (b) comprising a fragment of at least ‘n’ consecutive amino acids of SEQ ID NO: 80, wherein ‘n’ is 7 or more (e.g. 8, 10, 12, 14, 16, 18, 20, 25, 30, 35, 40, 50, 60, 70, 80, 90, 100, 150, 200, 250 or more). These IC46 proteins include variants of SEQ ID NO: 80. Preferred fragments of (b) comprise an epitope from SEQ ID NO: 80. Other preferred fragments lack one or more amino acids (e.g. 1, 2, 3, 4, 5, 6, 7, 8, 9, 10, 15, 20, 25 or more) from the C-terminus and/or one or more amino acids (e.g. 1, 2, 3, 4, 5, 6, 7, 8, 9, 10, 15, 20, 25 or more) from the N-terminus of SEQ ID NO: 80 while retaining at least one epitope of SEQ ID NO: 80. Other fragments omit one or more protein domains. Immunogenic fragments of IC46 are identified in table 1 of reference 82.

[0511] IC47

[0512] IC47 is a Signal recognition particle. For reference purposes, the amino acid sequence of full length IC47 is SEQ ID NO: 81 herein. In the R6 genome IC47 is spr1166 [205]. The use of IC47 for immunisation is reported in reference 82 (SEQ ID NO: 198 therein).

[0513] Preferred IC47 polypeptides for use with the invention comprise an amino acid sequence: (a) having 50% or more identity (e.g. 60%, 65%, 70%, 75%, 80%, 85%, 90%, 91%, 92%, 93%, 94%, 95%, 96%, 97%, 98%, 99%, 99.5% or more) to SEQ ID NO: 81; and/or (b) comprising a fragment of at least ‘n’ consecutive amino acids of SEQ ID NO: 81, wherein ‘n’ is 7 or more (e.g. 8, 10, 12, 14, 16, 18, 20, 25, 30, 35, 40, 50, 60, 70, 80, 90, 100, 150, 200, 250 or more). These IC47 proteins include variants of SEQ ID NO: 81. Preferred fragments of (b) comprise an epitope from SEQ ID NO: 81. Other preferred fragments lack one or more amino acids (e.g. 1, 2, 3, 4, 5, 6, 7, 8, 9, 10, 15, 20, 25 or more) from the C-terminus and/or one or more amino acids (e.g. 1, 2, 3, 4, 5, 6, 7, 8, 9, 10, 15, 20, 25 or more) from the N-terminus of SEQ ID NO: 81 while retaining at least one epitope of SEQ ID NO:

[0514] 81. Other fragments omit one or more protein domains. Immunogenic fragments of IC47 are identified in table 1 of reference 82.

[0515] IC48

[0516] IC48 is a N-acetylmannosamine-6-phosphate 2-epimerase. For reference purposes, the amino acid sequence of full length IC48 is SEQ ID NO: 82 herein. In the R6 genome IC48 is spr1529 [205]. The use of IC48 for immunisation is reported in reference 82 (SEQ ID NO: 199 therein).

[0517] Preferred IC48 polypeptides for use with the invention comprise an amino acid sequence: (a) having 50% or more identity (e.g. 60%, 65%, 70%, 75%, 80%, 85%, 90%, 91%, 92%, 93%, 94%, 95%, 96%, 97%, 98%, 99%, 99.5% or more) to SEQ ID NO: 82; and/or (b) comprising a fragment of at least ‘n’ consecutive amino acids of SEQ ID NO: 82, wherein ‘n’ is 7 or more (e.g. 8, 10, 12, 14, 16, 18, 20, 25, 30, 35, 40, 50, 60, 70, 80, 90, 100, 150, 200, 250 or more). These IC48 proteins include variants of SEQ ID NO: 82. Preferred fragments of (b) comprise an epitope from SEQ ID NO: 82. Other preferred fragments lack one or more amino acids (e.g. 1, 2, 3, 4, 5, 6, 7, 8, 9, 10, 15, 20, 25 or more) from the C-terminus and/or one or more amino acids (e.g. 1, 2, 3, 4, 5, 6, 7, 8, 9, 10, 15, 20, 25 or more) from the N-terminus of SEQ ID NO: 82 while retaining at least one epitope of SEQ ID NO: 82. Other fragments omit one or more protein domains. Immunogenic fragments of IC48 are identified in table 1 of reference 82.

[0518] IC49

[0519] IC49 is a chorismate synthase. For reference purposes, the amino acid sequence of full length IC49 is SEQ ID NO: 83 herein. In the R6 genome IC49 is spr1232 [205]. The use of IC49 for immunisation is reported in reference 82 (SEQ ID NO: 200 therein).

[0520] Preferred IC49 polypeptides for use with the invention comprise an amino acid sequence: (a) having 50% or more identity (e.g. 60%, 65%, 70%, 75%, 80%, 85%, 90%, 91%, 92%, 93%, 94%, 95%, 96%, 97%, 98%, 99%, 99.5% or more) to SEQ ID NO: 83; and/or (b) comprising a fragment of at least ‘n’ consecutive amino acids of SEQ ID NO: 83, wherein ‘n’ is 7 or more (e.g. 8, 10, 12, 14, 16, 18, 20, 25, 30, 35, 40, 50, 60, 70, 80, 90, 100, 150, 200, 250 or more). These IC49 proteins include variants of SEQ ID NO: 83. Preferred fragments of (b) comprise an epitope from SEQ ID NO: 83. Other preferred fragments lack one or more amino acids (e.g. 1, 2, 3, 4, 5, 6, 7, 8, 9, 10, 15, 20, 25 or more) from the C-terminus and/or one or more amino acids (e.g. 1, 2, 3, 4, 5, 6, 7, 8, 9, 10, 15, 20, 25 or more) from the N-terminus of SEQ ID NO: 83 while retaining at least one epitope of SEQ ID NO: 83. Other fragments omit one or more protein domains. Immunogenic fragments of IC49 are identified in table 1 of reference 82.

[0521] IC50

[0522] IC50 is annotated in reference 82 as a hypothetical protein. For reference purposes, the amino acid sequence of full length IC50 is SEQ ID NO: 84 herein. In the R6 genome IC50 is spr1236 [205]. The use of IC50 for immunisation is reported in reference 82 (SEQ ID NO: 201 therein).

[0523] Preferred IC50 polypeptides for use with the invention comprise an amino acid sequence: (a) having 50% or more identity (e.g. 60%, 65%, 70%, 75%, 80%, 85%, 90%, 91%, 92%, 93%, 94%, 95%, 96%, 97%, 98%, 99%, 99.5% or more) to SEQ ID NO: 84; and/or (b) comprising a fragment of at least ‘n’ consecutive amino acids of SEQ ID NO: 84, wherein ‘n’ is 7 or more (e.g. 8, 10, 12, 14, 16, 18, 20, 25, 30, 35, 40, 50, 60, 70, 80, 90, 100, 150, 200, 250 or more). These IC50 proteins include variants of SEQ ID NO: 84. Preferred fragments of (b) comprise an epitope from SEQ ID NO: 84. Other preferred fragments lack one or more amino acids (e.g. 1, 2, 3, 4, 5, 6, 7, 8, 9, 10, 15, 20, 25 or more) from the C-terminus and/or one or more amino acids (e.g. 1, 2, 3, 4, 5, 6, 7, 8, 9, 10, 15, 20, 25 or more) from the N-terminus of SEQ ID NO: 84 while retaining at least one epitope of SEQ ID NO: 84. Other fragments omit one or more protein domains. Immunogenic fragments of IC50 are identified in table 1 of reference 82.

[0524] IC51

[0525] IC51 is a Protease. For reference purposes, the amino acid sequence of full length IC51 is SEQ ID NO: 85 herein. In the R6 genome IC51 is spr1284 [205]. The use of IC51 for immunisation is reported in reference 82 (SEQ ID NO: 202 therein).

[0526] Preferred IC51 polypeptides for use with the invention comprise an amino acid sequence: (a) having 50% or more identity (e.g. 60%, 65%, 70%, 75%, 80%, 85%, 90%, 91%, 92%, 93%, 94%, 95%, 96%, 97%, 98%, 99%, 99.5% or more) to SEQ ID NO: 85; and/or (b) comprising a fragment of at least ‘n’ consecutive amino acids of SEQ ID NO: 85, wherein ‘n’ is 7 or more (e.g. 8, 10, 12, 14, 16, 18, 20, 25, 30, 35, 40, 50, 60, 70, 80, 90, 100, 150, 200, 250 or more). These IC51 proteins include variants of SEQ ID NO: 85. Preferred fragments of (b) comprise an epitope from SEQ ID NO: 85. Other preferred fragments lack one or more amino acids (e.g. 1, 2, 3, 4, 5, 6, 7, 8, 9, 10, 15, 20, 25 or more) from the C-terminus and/or one or more amino acids (e.g. 1, 2, 3, 4, 5, 6, 7, 8, 9, 10, 15, 20, 25 or more) from the N-terminus of SEQ ID NO: 85 while retaining at least one epitope of SEQ ID NO: 85. Other fragments omit one or more protein domains. Immunogenic fragments of IC51 are identified in table 1 of reference 82.

[0527] IC52

[0528] IC52 is a annotated in reference 82 as an oxidoreductase or aldo/keto reductase. For reference purposes, the amino acid sequence of full length IC52 is SEQ ID NO: 86 herein. In the R6 genome IC52 is spr1332 [205]. The use of IC52 for immunisation is reported in reference 82 (SEQ ID NO: 203 therein).

[0529] Preferred IC52 polypeptides for use with the invention comprise an amino acid sequence: (a) having 50% or more identity (e.g. 60%, 65%, 70%, 75%, 80%, 85%, 90%, 91%, 92%, 93%, 94%, 95%, 96%, 97%, 98%, 99%, 99.5% or more) to SEQ ID NO: 86; and/or (b) comprising a fragment of at least ‘n’ consecutive amino acids of SEQ ID NO: 86, wherein ‘n’ is 7 or more (e.g. 8, 10, 12, 14, 16, 18, 20, 25, 30, 35, 40, 50, 60, 70, 80, 90, 100, 150, 200, 250 or more). These IC52 proteins include variants of SEQ ID NO: 86. Preferred fragments of (b) comprise an epitope from SEQ ID NO: 86. Other preferred fragments lack one or more amino acids (e.g. 1, 2, 3, 4, 5, 6, 7, 8, 9, 10, 15, 20, 25 or more) from the C-terminus and/or one or more amino acids (e.g. 1, 2, 3, 4, 5, 6, 7, 8, 9, 10, 15, 20, 25 or more) from the N-terminus of SEQ ID NO: 86 while retaining at least one epitope of SEQ ID NO: 86. Other fragments omit one or more protein domains. Immunogenic fragments of IC52 are identified in table 1 of reference 82.

[0530] IC53

[0531] IC53 is annotated in reference 82 as a hypothetical protein. For reference purposes, the amino acid sequence of full length IC53 is SEQ ID NO: 87 herein. In the R6 genome IC53 is spr1370 [205]. The use of IC53 for immunisation is reported in reference 82 (SEQ ID NO: 204 therein).

[0532] Preferred IC53 polypeptides for use with the invention comprise an amino acid sequence: (a) having 50% or more identity (e.g. 60%, 65%, 70%, 75%, 80%, 85%, 90%, 91%, 92%, 93%, 94%, 95%, 96%, 97%, 98%, 99%, 99.5% or more) to SEQ ID NO: 87; and/or (b) comprising a fragment of at least ‘n’ consecutive amino acids of SEQ ID NO: 87, wherein ‘n’ is 7 or more (e.g. 8, 10, 12, 14, 16, 18, 20, 25, 30, 35, 40, 50, 60, 70, 80, 90, 100, 150, 200, 250 or more). These IC53 proteins include variants of SEQ ID NO: 87. Preferred fragments of (b) comprise an epitope from SEQ ID NO: 87. Other preferred fragments lack one or more amino acids (e.g. 1, 2, 3, 4, 5, 6, 7, 8, 9, 10, 15, 20, 25 or more) from the C-terminus and/or one or more amino acids (e.g. 1, 2, 3, 4, 5, 6, 7, 8, 9, 10, 15, 20, 25 or more) from the N-terminus of SEQ ID NO: 87 while retaining at least one epitope of SEQ ID NO: 87. Other fragments omit one or more protein domains. Immunogenic fragments of IC53 are identified in table 1 of reference 82.

[0533] IC54

[0534] IC54 is annotated as a conserved domain protein. For reference purposes, the amino acid sequence of full length IC54 is SEQ ID NO: 88 herein. In the R6 genome IC54 is spr1374 [205]. The use of IC54 for immunisation is reported in reference 82 (SEQ ID NO: 205 therein).

[0535] Preferred IC54 polypeptides for use with the invention comprise an amino acid sequence: (a) having 50% or more identity (e.g. 60%, 65%, 70%, 75%, 80%, 85%, 90%, 91%, 92%, 93%, 94%, 95%, 96%, 97%, 98%, 99%, 99.5% or more) to SEQ ID NO: 88; and/or (b) comprising a fragment of at least ‘n’ consecutive amino acids of SEQ ID NO: 88, wherein ‘n’ is 7 or more (e.g. 8, 10, 12, 14, 16, 18, 20, 25, 30, 35, 40, 50, 60, 70, 80, 90, 100, 150, 200, 250 or more). These IC54 proteins include variants of SEQ ID NO: 88. Preferred fragments of (b) comprise an epitope from SEQ ID NO: 88. Other preferred fragments lack one or more amino acids (e.g. 1, 2, 3, 4, 5, 6, 7, 8, 9, 10, 15, 20, 25 or more) from the C-terminus and/or one or more amino acids (e.g. 1, 2, 3, 4, 5, 6, 7, 8, 9, 10, 15, 20, 25 or more) from the N-terminus of SEQ ID NO: 88 while retaining at least one epitope of SEQ ID NO: 88. Other fragments omit one or more protein domains. Immunogenic fragments of IC54 are identified in table 1 of reference 82.

[0536] IC55

[0537] IC55 is a ABC transporter substrate-binding protein. For reference purposes, the amino acid sequence of full length IC55 is SEQ ID NO: 89 herein. In the R6 genome IC55 is spr1382 [205]. The use of IC55 for immunisation is reported in reference 82 (SEQ ID NO: 206 therein).

[0538] Preferred IC55 polypeptides for use with the invention comprise an amino acid sequence: (a) having 50% or more identity (e.g. 60%, 65%, 70%, 75%, 80%, 85%, 90%, 91%, 92%, 93%, 94%, 95%, 96%, 97%, 98%, 99%, 99.5% or more) to SEQ ID NO: 89; and/or (b) comprising a fragment of at least ‘n’ consecutive amino acids of SEQ ID NO: 89, wherein ‘n’ is 7 or more (e.g. 8, 10, 12, 14, 16, 18, 20, 25, 30, 35, 40, 50, 60, 70, 80, 90, 100, 150, 200, 250 or more). These IC55 proteins include variants of SEQ ID NO: 89. Preferred fragments of (b) comprise an epitope from SEQ ID NO: 89. Other preferred fragments lack one or more amino acids (e.g. 1, 2, 3, 4, 5, 6, 7, 8, 9, 10, 15, 20, 25 or more) from the C-terminus and/or one or more amino acids (e.g. 1, 2, 3, 4, 5, 6, 7, 8, 9, 10, 15, 20, 25 or more) from the N-terminus of SEQ ID NO: 89 while retaining at least one epitope of SEQ ID NO: 89. Other fragments omit one or more protein domains. Immunogenic fragments of IC55 are identified in table 1 of reference 82.

[0539] IC56

[0540] IC56 is annotated in reference 82 as a hypothetical protein. For reference purposes, the amino acid sequence of full length IC56 is SEQ ID NO: 90 herein. In the R6 genome IC56 is spr1457 [205]. The use of IC56 for immunisation is reported in reference 82 (SEQ ID NO: 208 therein).

[0541] Preferred IC56 polypeptides for use with the invention comprise an amino acid sequence: (a) having 50% or more identity (e.g. 60%, 65%, 70%, 75%, 80%, 85%, 90%, 91%, 92%, 93%, 94%, 95%, 96%, 97%, 98%, 99%, 99.5% or more) to SEQ ID NO: 90; and/or (b) comprising a fragment of at least ‘n’ consecutive amino acids of SEQ ID NO: 90, wherein ‘n’ is 7 or more (e.g. 8, 10, 12, 14, 16, 18, 20, 25, 30, 35, 40, 50, 60, 70, 80, 90, 100, 150, 200, 250 or more). These IC56 proteins include variants of SEQ ID NO: 90. Preferred fragments of (b) comprise an epitope from SEQ ID NO: 90. Other preferred fragments lack one or more amino acids (e.g. 1, 2, 3, 4, 5, 6, 7, 8, 9, 10, 15, 20, 25 or more) from the C-terminus and/or one or more amino acids (e.g. 1, 2, 3, 4, 5, 6, 7, 8, 9, 10, 15, 20, 25 or more) from the N-terminus of SEQ ID NO: 90 while retaining at least one epitope of SEQ ID NO: 90. Other fragments omit one or more protein domains. Immunogenic fragments of IC56 are identified in table 1 of reference 82.

[0542] IC57

[0543] IC57 is a Cell-division initiation protein. For reference purposes, the amino acid sequence of full length IC57 is SEQ ID NO: 91 herein. In the R6 genome IC57 is spr1505 [205]. The use of IC57 for immunisation is reported in reference 82 (SEQ ID NO: 209 therein).

[0544] Preferred IC57 polypeptides for use with the invention comprise an amino acid sequence: (a) having 50% or more identity (e.g. 60%, 65%, 70%, 75%, 80%, 85%, 90%, 91%, 92%, 93%, 94%, 95%, 96%, 97%, 98%, 99%, 99.5% or more) to SEQ ID NO: 91; and/or (b) comprising a fragment of at least ‘n’ consecutive amino acids of SEQ ID NO: 91, wherein ‘n’ is 7 or more (e.g. 8, 10, 12, 14, 16, 18, 20, 25, 30, 35, 40, 50, 60, 70, 80, 90, 100, 150, 200, 250 or more). These IC57 proteins include variants of SEQ ID NO: 91. Preferred fragments of (b) comprise an epitope from SEQ ID NO: 91. Other preferred fragments lack one or more amino acids (e.g. 1, 2, 3, 4, 5, 6, 7, 8, 9, 10, 15, 20, 25 or more) from the C-terminus and/or one or more amino acids (e.g. 1, 2, 3, 4, 5, 6, 7, 8, 9, 10, 15, 20, 25 or more) from the N-terminus of SEQ ID NO: 91 while retaining at least one epitope of SEQ ID NO: 91. Other fragments omit one or more protein domains. Immunogenic fragments of IC57 are identified in table 1 of reference 82.

[0545] IC58

[0546] IC58 is annotated in reference 82 as ylmF protein. For reference purposes, the amino acid sequence of full length IC58 is SEQ ID NO: 92 herein. In the R6 genome IC58 is spr1508 [205]. The use of IC58 for immunisation is reported in reference 82 (SEQ ID NO: 210 therein).

[0547] Preferred IC58 polypeptides for use with the invention comprise an amino acid sequence: (a) having 50% or more identity (e.g. 60%, 65%, 70%, 75%, 80%, 85%, 90%, 91%, 92%, 93%, 94%, 95%, 96%, 97%, 98%, 99%, 99.5% or more) to SEQ ID NO: 92; and/or (b) comprising a fragment of at least ‘n’ consecutive amino acids of SEQ ID NO: 92, wherein ‘n’ is 7 or more (e.g. 8, 10, 12, 14, 16, 18, 20, 25, 30, 35, 40, 50, 60, 70, 80, 90, 100, 150, 200, 250 or more). These IC58 proteins include variants of SEQ ID NO: 92. Preferred fragments of (b) comprise an epitope from SEQ ID NO: 92. Other preferred fragments lack one or more amino acids (e.g. 1, 2, 3, 4, 5, 6, 7, 8, 9, 10, 15, 20, 25 or more) from the C-terminus and/or one or more amino acids (e.g. 1, 2, 3, 4, 5, 6, 7, 8, 9, 10, 15, 20, 25 or more) from the N-terminus of SEQ ID NO: 92 while retaining at least one epitope of SEQ ID NO: 92. Other fragments omit one or more protein domains. Immunogenic fragments of IC58 are identified in table 1 of reference 82.

[0548] IC59

[0549] IC59 is a N-acetylneuraminate lyase subunit. For reference purposes, the amino acid sequence of full length IC59 is SEQ ID NO: 93 herein. In the R6 genome IC59 is spr1186 [205]. The use of IC59 for immunisation is reported in reference 82 (SEQ ID NO: 211 therein).

[0550] Preferred IC59 polypeptides for use with the invention comprise an amino acid sequence: (a) having 50% or more identity (e.g. 60%, 65%, 70%, 75%, 80%, 85%, 90%, 91%, 92%, 93%, 94%, 95%, 96%, 97%, 98%, 99%, 99.5% or more) to SEQ ID NO: 93; and/or (b) comprising a fragment of at least ‘n’ consecutive amino acids of SEQ ID NO: 93, wherein ‘n’ is 7 or more (e.g. 8, 10, 12, 14, 16, 18, 20, 25, 30, 35, 40, 50, 60, 70, 80, 90, 100, 150, 200, 250 or more). These IC59 proteins include variants of SEQ ID NO: 93. Preferred fragments of (b) comprise an epitope from SEQ ID NO: 93. Other preferred fragments lack one or more amino acids (e.g. 1, 2, 3, 4, 5, 6, 7, 8, 9, 10, 15, 20, 25 or more) from the C-terminus and/or one or more amino acids (e.g. 1, 2, 3, 4, 5, 6, 7, 8, 9, 10, 15, 20, 25 or more) from the N-terminus of SEQ ID NO: 93 while retaining at least one epitope of SEQ ID NO: 93. Other fragments omit one or more protein domains. Immunogenic fragments of IC59 are identified in table 1 of reference 82.

[0551] IC60

[0552] IC60 is a Eukaryotic-type serine/threonine kinase (StkP). For reference purposes, the amino acid sequence of full length IC60 is SEQ ID NO: 94 herein. In the R6 genome IC60 is spr1577 [205]. The use of IC60 for immunisation is reported in reference 82 (SEQ ID NO: 214 therein), and it is reported to be a lead vaccine candidate in reference 114.

[0553] Preferred IC60 polypeptides for use with the invention comprise an amino acid sequence: (a) having 50% or more identity (e.g. 60%, 65%, 70%, 75%, 80%, 85%, 90%, 91%, 92%, 93%, 94%, 95%, 96%, 97%, 98%, 99%, 99.5% or more) to SEQ ID NO: 94; and/or (b) comprising a fragment of at least ‘n’ consecutive amino acids of SEQ ID NO: 94, wherein ‘n’ is 7 or more (e.g. 8, 10, 12, 14, 16, 18, 20, 25, 30, 35, 40, 50, 60, 70, 80, 90, 100, 150, 200, 250 or more). These IC60 proteins include variants of SEQ ID NO: 94. Preferred fragments of (b) comprise an epitope from SEQ ID NO: 94. Other preferred fragments lack one or more amino acids (e.g. 1, 2, 3, 4, 5, 6, 7, 8, 9, 10, 15, 20, 25 or more) from the C-terminus and/or one or more amino acids (e.g. 1, 2, 3, 4, 5, 6, 7, 8, 9, 10, 15, 20, 25 or more) from the N-terminus of SEQ ID NO: 94 while retaining at least one epitope of SEQ ID NO: 94. Other fragments omit one or more protein domains. Immunogenic fragments of IC60 are identified in table 1 of reference 82. A further useful fragment is disclosed as SEQ ID NO: 2 in reference 91 (corresponding to amino acids 345-659 of SEQ ID NO: 94 herein).

[0554] IC61

[0555] IC61 is a methionyl-tRNA formyltransferase. For reference purposes, the amino acid sequence of full length IC61 is SEQ ID NO: 95 herein. In the R6 genome IC61 is spr1580 [205]. The use of IC61 for immunisation is reported in reference 82 (SEQ ID NO: 215 therein).

[0556] Preferred IC61 polypeptides for use with the invention comprise an amino acid sequence: (a) having 50% or more identity (e.g. 60%, 65%, 70%, 75%, 80%, 85%, 90%, 91%, 92%, 93%, 94%, 95%, 96%, 97%, 98%, 99%, 99.5% or more) to SEQ ID NO: 95; and/or (b) comprising a fragment of at least ‘n’ consecutive amino acids of SEQ ID NO: 95, wherein ‘n’ is 7 or more (e.g. 8, 10, 12, 14, 16, 18, 20, 25, 30, 35, 40, 50, 60, 70, 80, 90, 100, 150, 200, 250 or more). These IC61 proteins include variants of SEQ ID NO: 95. Preferred fragments of (b) comprise an epitope from SEQ ID NO: 95.

[0557] Other preferred fragments lack one or more amino acids (e.g. 1, 2, 3, 4, 5, 6, 7, 8, 9, 10, 15, 20, 25 or more) from the C-terminus and/or one or more amino acids (e.g. 1, 2, 3, 4, 5, 6, 7, 8, 9, 10, 15, 20, 25 or more) from the N-terminus of SEQ ID NO: 95 while retaining at least one epitope of SEQ ID NO: 95. Other fragments omit one or more protein domains. Immunogenic fragments of IC61 are identified in table 1 of reference 82.

[0558] IC62

[0559] IC62 is a translocase. For reference purposes, the amino acid sequence of full length IC62 is SEQ ID NO: 96 herein. In the R6 genome IC62 is spr1544 [205]. The use of IC62 for immunisation is reported in reference 82 (SEQ ID NO: 216 therein).

[0560] Preferred IC62 polypeptides for use with the invention comprise an amino acid sequence: (a) having 50% or more identity (e.g. 60%, 65%, 70%, 75%, 80%, 85%, 90%, 91%, 92%, 93%, 94%, 95%, 96%, 97%, 98%, 99%, 99.5% or more) to SEQ ID NO: 96; and/or (b) comprising a fragment of at least ‘n’ consecutive amino acids of SEQ ID NO: 96, wherein ‘n’ is 7 or more (e.g. 8, 10, 12, 14, 16, 18, 20, 25, 30, 35, 40, 50, 60, 70, 80, 90, 100, 150, 200, 250 or more). These IC62 proteins include variants of SEQ ID NO: 96. Preferred fragments of (b) comprise an epitope from SEQ ID NO: 96. Other preferred fragments lack one or more amino acids (e.g. 1, 2, 3, 4, 5, 6, 7, 8, 9, 10, 15, 20, 25 or more) from the C-terminus and/or one or more amino acids (e.g. 1, 2, 3, 4, 5, 6, 7, 8, 9, 10, 15, 20, 25 or more) from the N-terminus of SEQ ID NO: 96 while retaining at least one epitope of SEQ ID NO: 96. Other fragments omit one or more protein domains. Immunogenic fragments of IC62 are identified in table 1 of reference 82.

[0561] IC63

[0562] IC63 is annotated in reference 82 as a cell wall surface anchor family protein. For reference purposes, the amino acid sequence of full length IC63 is SEQ ID NO: 97 herein. In the R6 genome IC63 is spr1403 [205]. The use of IC63 for immunisation is reported in reference 82 (SEQ ID NO: 217 therein).

[0563] Preferred IC63 polypeptides for use with the invention comprise an amino acid sequence: (a) having 50% or more identity (e.g. 60%, 65%, 70%, 75%, 80%, 85%, 90%, 91%, 92%, 93%, 94%, 95%, 96%, 97%, 98%, 99%, 99.5% or more) to SEQ ID NO: 97; and/or (b) comprising a fragment of at least ‘n’ consecutive amino acids of SEQ ID NO: 97, wherein ‘n’ is 7 or more (e.g. 8, 10, 12, 14, 16, 18, 20, 25, 30, 35, 40, 50, 60, 70, 80, 90, 100, 150, 200, 250 or more). These IC63 proteins include variants of SEQ ID NO: 97. Preferred fragments of (b) comprise an epitope from SEQ ID NO: 97. Other preferred fragments lack one or more amino acids (e.g. 1, 2, 3, 4, 5, 6, 7, 8, 9, 10, 15, 20, 25 or more) from the C-terminus and/or one or more amino acids (e.g. 1, 2, 3, 4, 5, 6, 7, 8, 9, 10, 15, 20, 25 or more) from the N-terminus of SEQ ID NO: 97 while retaining at least one epitope of SEQ ID NO: 97. Other fragments omit one or more protein domains. Immunogenic fragments of IC63 are identified in table 1 of reference 82.

[0564] IC64

[0565] IC64 is annotated in reference 82 as a putative general stress protein 24. For reference purposes, the amino acid sequence of full length IC64 is SEQ ID NO: 98 herein. In the R6 genome IC64 is spr1625 [205]. The use of IC64 for immunisation is reported in reference 82 (SEQ ID NO: 218 therein).

[0566] Preferred IC64 polypeptides for use with the invention comprise an amino acid sequence: (a) having 50% or more identity (e.g. 60%, 65%, 70%, 75%, 80%, 85%, 90%, 91%, 92%, 93%, 94%, 95%, 96%, 97%, 98%, 99%, 99.5% or more) to SEQ ID NO: 98; and/or (b) comprising a fragment of at least ‘n’ consecutive amino acids of SEQ ID NO: 98, wherein ‘n’ is 7 or more (e.g. 8, 10, 12, 14, 16, 18, 20, 25, 30, 35, 40, 50, 60, 70, 80, 90, 100, 150, 200, 250 or more). These IC64 proteins include variants of SEQ ID NO: 98. Preferred fragments of (b) comprise an epitope from SEQ ID NO: 98. Other preferred fragments lack one or more amino acids (e.g. 1, 2, 3, 4, 5, 6, 7, 8, 9, 10, 15, 20, 25 or more) from the C-terminus and/or one or more amino acids (e.g. 1, 2, 3, 4, 5, 6, 7, 8, 9, 10, 15, 20, 25 or more) from the N-terminus of SEQ ID NO: 98 while retaining at least one epitope of SEQ ID NO: 98. Other fragments omit one or more protein domains. Immunogenic fragments of IC64 are identified in table 1 of reference 82.

[0567] IC65

[0568] IC65 is a ABC transporter ATP-binding protein. For reference purposes, the amino acid sequence of full length IC65 is SEQ ID NO: 99 herein. In the R6 genome IC65 is spr1704 [205]. The use of IC65 for immunisation is reported in reference 82 (SEQ ID NO: 219 therein).

[0569] Preferred IC65 polypeptides for use with the invention comprise an amino acid sequence: (a) having 50% or more identity (e.g. 60%, 65%, 70%, 75%, 80%, 85%, 90%, 91%, 92%, 93%, 94%, 95%, 96%, 97%, 98%, 99%, 99.5% or more) to SEQ ID NO: 99; and/or (b) comprising a fragment of at least ‘n’ consecutive amino acids of SEQ ID NO: 99, wherein ‘n’ is 7 or more (e.g. 8, 10, 12, 14, 16, 18, 20, 25, 30, 35, 40, 50, 60, 70, 80, 90, 100, 150, 200, 250 or more). These IC65 proteins include variants of SEQ ID NO: 99. Preferred fragments of (b) comprise an epitope from SEQ ID NO: 99.

[0570] Other preferred fragments lack one or more amino acids (e.g. 1, 2, 3, 4, 5, 6, 7, 8, 9, 10, 15, 20, 25 or more) from the C-terminus and/or one or more amino acids (e.g. 1, 2, 3, 4, 5, 6, 7, 8, 9, 10, 15, 20, 25 or more) from the N-terminus of SEQ ID NO: 99 while retaining at least one epitope of SEQ ID NO: 99. Other fragments omit one or more protein domains. Immunogenic fragments of IC65 are identified in table 1 of reference 82.

[0571] IC66

[0572] IC66 is, as mentioned above, a variant form of spr1707. Useful IC66 polypeptides for use with the invention comprise an amino acid sequence: (a) having 50% or more identity (e.g. 60%, 65%, 70%, 75%, 80%, 85%, 90%, 91%, 92%, 93%, 94%, 95%, 96%, 97%, 98%, 99%, 99.5% or more) to SEQ ID NO: 100; and/or (b) comprising a fragment of at least ‘n’ consecutive amino acids of SEQ ID NO: 100, wherein ‘n’ is 7 or more (e.g. 8, 10, 12, 14, 16, 18, 20, 25, 30, 35, 40, 50, 60, 70, 80, 90, 100, 150, 200, 250 or more). These IC66 proteins include variants of SEQ ID NO: 100. Preferred fragments of (b) comprise an epitope from SEQ ID NO: 100. Other preferred fragments lack one or more amino acids (e.g. 1, 2, 3, 4, 5, 6, 7, 8, 9, 10, 15, 20, 25 or more) from the C-terminus and/or one or more amino acids (e.g. 1, 2, 3, 4, 5, 6, 7, 8, 9, 10, 15, 20, 25 or more) from the N-terminus of SEQ ID NO: 100 while retaining at least one epitope of SEQ ID NO: 100. Other fragments omit one or more protein domains.

[0573] IC67

[0574] IC67 is a Subtilisin-like serine protease. For reference purposes, the amino acid sequence of full length IC67 is SEQ ID NO: 101 herein. In the R6 genome IC67 is spr1771 [205]. The use of IC67 for immunisation is reported in reference 82 (SEQ ID NO: 222 therein).

[0575] Preferred IC67 polypeptides for use with the invention comprise an amino acid sequence: (a) having 50% or more identity (e.g. 60%, 65%, 70%, 75%, 80%, 85%, 90%, 91%, 92%, 93%, 94%, 95%, 96%, 97%, 98%, 99%, 99.5% or more) to SEQ ID NO: 101; and/or (b) comprising a fragment of at least ‘n’ consecutive amino acids of SEQ ID NO: 101, wherein ‘n’ is 7 or more (e.g. 8, 10, 12, 14, 16, 18, 20, 25, 30, 35, 40, 50, 60, 70, 80, 90, 100, 150, 200, 250 or more). These IC67 proteins include variants of SEQ ID NO: 101. Preferred fragments of (b) comprise an epitope from SEQ ID NO: 101. Other preferred fragments lack one or more amino acids (e.g. 1, 2, 3, 4, 5, 6, 7, 8, 9, 10, 15, 20, 25 or more) from the C-terminus and/or one or more amino acids (e.g. 1, 2, 3, 4, 5, 6, 7, 8, 9, 10, 15, 20, 25 or more) from the N-terminus of SEQ ID NO: 101 while retaining at least one epitope of SEQ ID NO: 101. Other fragments omit one or more protein domains. Immunogenic fragments of IC67 are identified in table 1 of reference 82.

[0576] IC68

[0577] IC68 is a Cmp-binding-factor 1. For reference purposes, the amino acid sequence of full length IC68 is SEQ ID NO: 102 herein. In the R6 genome IC68 is spr1794 [205]. The use of IC68 for immunisation is reported in reference 82 (SEQ ID NO: 223 therein).

[0578] Preferred IC68 polypeptides for use with the invention comprise an amino acid sequence: (a) having 50% or more identity (e.g. 60%, 65%, 70%, 75%, 80%, 85%, 90%, 91%, 92%, 93%, 94%, 95%, 96%, 97%, 98%, 99%, 99.5% or more) to SEQ ID NO: 102; and/or (b) comprising a fragment of at least ‘n’ consecutive amino acids of SEQ ID NO: 102, wherein ‘n’ is 7 or more (e.g. 8, 10, 12, 14, 16, 18, 20, 25, 30, 35, 40, 50, 60, 70, 80, 90, 100, 150, 200, 250 or more). These IC68 proteins include variants of SEQ ID NO: 102. Preferred fragments of (b) comprise an epitope from SEQ ID NO: 102. Other preferred fragments lack one or more amino acids (e.g. 1, 2, 3, 4, 5, 6, 7, 8, 9, 10, 15, 20, 25 or more) from the C-terminus and/or one or more amino acids (e.g. 1, 2, 3, 4, 5, 6, 7, 8, 9, 10, 15, 20, 25 or more) from the N-terminus of SEQ ID NO: 102 while retaining at least one epitope of SEQ ID NO: 102. Other fragments omit one or more protein domains. Immunogenic fragments of IC68 are identified in table 1 of reference 82.

[0579] IC69

[0580] IC69 is annotated in reference 82 as cell wall surface anchor family protein. For reference purposes, the amino acid sequence of full length IC69 is SEQ ID NO: 103 herein. In the R6 genome IC69 is spr1806 [205]. The use of IC69 for immunisation is reported in reference 82 (SEQ ID NO: 224 therein).

[0581] Preferred IC69 polypeptides for use with the invention comprise an amino acid sequence: (a) having 50% or more identity (e.g. 60%, 65%, 70%, 75%, 80%, 85%, 90%, 91%, 92%, 93%, 94%, 95%, 96%, 97%, 98%, 99%, 99.5% or more) to SEQ ID NO: 103; and/or (b) comprising a fragment of at least ‘n’ consecutive amino acids of SEQ ID NO: 103, wherein ‘n’ is 7 or more (e.g. 8, 10, 12, 14, 16, 18, 20, 25, 30, 35, 40, 50, 60, 70, 80, 90, 100, 150, 200, 250 or more). These IC69 proteins include variants of SEQ ID NO: 103. Preferred fragments of (b) comprise an epitope from SEQ ID NO: 103. Other preferred fragments lack one or more amino acids (e.g. 1, 2, 3, 4, 5, 6, 7, 8, 9, 10, 15, 20, 25 or more) from the C-terminus and/or one or more amino acids (e.g. 1, 2, 3, 4, 5, 6, 7, 8, 9, 10, 15, 20, 25 or more) from the N-terminus of SEQ ID NO: 103 while retaining at least one epitope of SEQ ID NO: 103. Other fragments omit one or more protein domains. Immunogenic fragments of IC69 are identified in table 1 of reference 82.

[0582] IC70

[0583] IC70 is a Catabolite control protein A. For reference purposes, the amino acid sequence of full length IC70 is SEQ ID NO: 104 herein. In the R6 genome IC70 is spr1813 [205]. The use of IC70 for immunisation is reported in reference 82 (SEQ ID NO: 225 therein).

[0584] Preferred IC70 polypeptides for use with the invention comprise an amino acid sequence: (a) having 50% or more identity (e.g. 60%, 65%, 70%, 75%, 80%, 85%, 90%, 91%, 92%, 93%, 94%, 95%, 96%, 97%, 98%, 99%, 99.5% or more) to SEQ ID NO: 104; and/or (b) comprising a fragment of at least ‘n’ consecutive amino acids of SEQ ID NO: 104, wherein ‘n’ is 7 or more (e.g. 8, 10, 12, 14, 16, 18, 20, 25, 30, 35, 40, 50, 60, 70, 80, 90, 100, 150, 200, 250 or more). These IC70 proteins include variants of SEQ ID NO: 104. Preferred fragments of (b) comprise an epitope from SEQ ID NO: 104. Other preferred fragments lack one or more amino acids (e.g. 1, 2, 3, 4, 5, 6, 7, 8, 9, 10, 15, 20, 25 or more) from the C-terminus and/or one or more amino acids (e.g. 1, 2, 3, 4, 5, 6, 7, 8, 9, 10, 15, 20, 25 or more) from the N-terminus of SEQ ID NO: 104 while retaining at least one epitope of SEQ ID NO: 104. Other fragments omit one or more protein domains. Immunogenic fragments of IC70 are identified in table 1 of reference 82.

[0585] IC71

[0586] IC71 is a Beta-glucosidase. For reference purposes, the amino acid sequence of full length IC71 is SEQ ID NO: 105 herein. In the R6 genome IC71 is spr1833 [205]. The use of IC71 for immunisation is reported in reference 82 (SEQ ID NO: 226 therein).

[0587] Preferred IC71 polypeptides for use with the invention comprise an amino acid sequence: (a) having 50% or more identity (e.g. 60%, 65%, 70%, 75%, 80%, 85%, 90%, 91%, 92%, 93%, 94%, 95%, 96%, 97%, 98%, 99%, 99.5% or more) to SEQ ID NO: 105; and/or (b) comprising a fragment of at least ‘n’ consecutive amino acids of SEQ ID NO: 105, wherein ‘n’ is 7 or more (e.g. 8, 10, 12, 14, 16, 18, 20, 25, 30, 35, 40, 50, 60, 70, 80, 90, 100, 150, 200, 250 or more). These IC71 proteins include variants of SEQ ID NO: 105. Preferred fragments of (b) comprise an epitope from SEQ ID NO: 105. Other preferred fragments lack one or more amino acids (e.g. 1, 2, 3, 4, 5, 6, 7, 8, 9, 10, 15, 20, 25 or more) from the C-terminus and/or one or more amino acids (e.g. 1, 2, 3, 4, 5, 6, 7, 8, 9, 10, 15, 20, 25 or more) from the N-terminus of SEQ ID NO: 105 while retaining at least one epitope of SEQ ID NO: 105. Other fragments omit one or more protein domains. Immunogenic fragments of IC71 are identified in table 1 of reference 82.

[0588] IC72

[0589] IC72 is annotated in reference 82 as a hypothetical protein. For reference purposes, the amino acid sequence of full length IC72 is SEQ ID NO: 106 herein. In the R6 genome IC72 is spr1838 [205]. The use of IC72 for immunisation is reported in reference 82 (SEQ ID NO: 227 therein).

[0590] Preferred IC72 polypeptides for use with the invention comprise an amino acid sequence: (a) having 50% or more identity (e.g. 60%, 65%, 70%, 75%, 80%, 85%, 90%, 91%, 92%, 93%, 94%, 95%, 96%, 97%, 98%, 99%, 99.5% or more) to SEQ ID NO: 106; and/or (b) comprising a fragment of at least ‘n’ consecutive amino acids of SEQ ID NO: 106, wherein ‘n’ is 7 or more (e.g. 8, 10, 12, 14, 16, 18, 20, 25, 30, 35, 40, 50, 60, 70, 80, 90, 100, 150, 200, 250 or more). These IC72 proteins include variants of SEQ ID NO: 106. Preferred fragments of (b) comprise an epitope from SEQ ID NO: 106. Other preferred fragments lack one or more amino acids (e.g. 1, 2, 3, 4, 5, 6, 7, 8, 9, 10, 15, 20, 25 or more) from the C-terminus and/or one or more amino acids (e.g. 1, 2, 3, 4, 5, 6, 7, 8, 9, 10, 15, 20, 25 or more) from the N-terminus of SEQ ID NO: 106 while retaining at least one epitope of SEQ ID NO: 106. Other fragments omit one or more protein domains. Immunogenic fragments of IC72 are identified in table 1 of reference 82.

[0591] IC73

[0592] IC73 is annotated in reference 82 as a hypothetical protein. For reference purposes, the amino acid sequence of full length IC73 is SEQ ID NO: 107 herein. In the R6 genome IC73 is spr1850 [205]. The use of IC73 for immunisation is reported in reference 82 (SEQ ID NO: 228 therein).

[0593] Preferred IC73 polypeptides for use with the invention comprise an amino acid sequence: (a) having 50% or more identity (e.g. 60%, 65%, 70%, 75%, 80%, 85%, 90%, 91%, 92%, 93%, 94%, 95%, 96%, 97%, 98%, 99%, 99.5% or more) to SEQ ID NO: 107; and/or (b) comprising a fragment of at least ‘n’ consecutive amino acids of SEQ ID NO: 107, wherein ‘n’ is 7 or more (e.g. 8, 10, 12, 14, 16, 18, 20, 25, 30, 35, 40, 50, 60, 70, 80, 90, 100, 150, 200, 250 or more). These IC73 proteins include variants of SEQ ID NO: 107. Preferred fragments of (b) comprise an epitope from SEQ ID NO: 107. Other preferred fragments lack one or more amino acids (e.g. 1, 2, 3, 4, 5, 6, 7, 8, 9, 10, 15, 20, 25 or more) from the C-terminus and/or one or more amino acids (e.g. 1, 2, 3, 4, 5, 6, 7, 8, 9, 10, 15, 20, 25 or more) from the N-terminus of SEQ ID NO: 107 while retaining at least one epitope of SEQ ID NO: 107. Other fragments omit one or more protein domains. Immunogenic fragments of IC73 are identified in table 1 of reference 82.

[0594] IC74

[0595] IC74 is annotated in reference 82 as a hypothetical protein. For reference purposes, the amino acid sequence of full length IC74 is SEQ ID NO: 108 herein. In the R6 genome IC74 is spr1859 [205]. The use of IC74 for immunisation is reported in reference 82 (SEQ ID NO: 229 therein).

[0596] Preferred IC74 polypeptides for use with the invention comprise an amino acid sequence: (a) having 50% or more identity (e.g. 60%, 65%, 70%, 75%, 80%, 85%, 90%, 91%, 92%, 93%, 94%, 95%, 96%, 97%, 98%, 99%, 99.5% or more) to SEQ ID NO: 108; and/or (b) comprising a fragment of at least ‘n’ consecutive amino acids of SEQ ID NO: 108, wherein ‘n’ is 7 or more (e.g. 8, 10, 12, 14, 16, 18, 20, 25, 30, 35, 40, 50, 60, 70, 80, 90, 100, 150, 200, 250 or more). These IC74 proteins include variants of SEQ ID NO: 108. Preferred fragments of (b) comprise an epitope from SEQ ID NO: 108. Other preferred fragments lack one or more amino acids (e.g. 1, 2, 3, 4, 5, 6, 7, 8, 9, 10, 15, 20, 25 or more) from the C-terminus and/or one or more amino acids (e.g. 1, 2, 3, 4, 5, 6, 7, 8, 9, 10, 15, 20, 25 or more) from the N-terminus of SEQ ID NO: 108 while retaining at least one epitope of SEQ ID NO: 108. Other fragments omit one or more protein domains. Immunogenic fragments of IC74 are identified in table 1 of reference 82.

[0597] IC75

[0598] IC75 is a Competence protein. For reference purposes, the amino acid sequence of full length IC75 is SEQ ID NO: 109 herein. In the R6 genome IC75 is spr1862 [205]. The use of IC75 for immunisation is reported in reference 82 (SEQ ID NO: 230 therein).

[0599] Preferred IC75 polypeptides for use with the invention comprise an amino acid sequence: (a) having 50% or more identity (e.g. 60%, 65%, 70%, 75%, 80%, 85%, 90%, 91%, 92%, 93%, 94%, 95%, 96%, 97%, 98%, 99%, 99.5% or more) to SEQ ID NO: 109; and/or (b) comprising a fragment of at least ‘n’ consecutive amino acids of SEQ ID NO: 109, wherein ‘n’ is 7 or more (e.g. 8, 10, 12, 14, 16, 18, 20, 25, 30, 35, 40, 50, 60, 70, 80, 90, 100, 150, 200, 250 or more). These IC75 proteins include variants of SEQ ID NO: 109. Preferred fragments of (b) comprise an epitope from SEQ ID NO: 109. Other preferred fragments lack one or more amino acids (e.g. 1, 2, 3, 4, 5, 6, 7, 8, 9, 10, 15, 20, 25 or more) from the C-terminus and/or one or more amino acids (e.g. 1, 2, 3, 4, 5, 6, 7, 8, 9, 10, 15, 20, 25 or more) from the N-terminus of SEQ ID NO: 109 while retaining at least one epitope of SEQ ID NO: 109. Other fragments omit one or more protein domains. Immunogenic fragments of IC75 are identified in table 1 of reference 82.

[0600] IC76

[0601] IC76 is a UTP-glucose-1-phosphate uridylyltransferase. For reference purposes, the amino acid sequence of full length IC76 is SEQ ID NO: 110 herein. In the R6 genome IC76 is spr1903 [205]. The use of IC76 for immunisation is reported in reference 82 (SEQ ID NO: 231 therein).

[0602] Preferred IC76 polypeptides for use with the invention comprise an amino acid sequence: (a) having 50% or more identity (e.g. 60%, 65%, 70%, 75%, 80%, 85%, 90%, 91%, 92%, 93%, 94%, 95%, 96%, 97%, 98%, 99%, 99.5% or more) to SEQ ID NO: 110; and/or (b) comprising a fragment of at least ‘n’ consecutive amino acids of SEQ ID NO: 110, wherein ‘n’ is 7 or more (e.g. 8, 10, 12, 14, 16, 18, 20, 25, 30, 35, 40, 50, 60, 70, 80, 90, 100, 150, 200, 250 or more). These IC76 proteins include variants of SEQ ID NO: 110. Preferred fragments of (b) comprise an epitope from SEQ ID NO: 110. Other preferred fragments lack one or more amino acids (e.g. 1, 2, 3, 4, 5, 6, 7, 8, 9, 10, 15, 20, 25 or more) from the C-terminus and/or one or more amino acids (e.g. 1, 2, 3, 4, 5, 6, 7, 8, 9, 10, 15, 20, 25 or more) from the N-terminus of SEQ ID NO: 110 while retaining at least one epitope of SEQ ID NO: 110. Other fragments omit one or more protein domains. Immunogenic fragments of IC76 are identified in table 1 of reference 82.

[0603] IC77

[0604] IC77 is a Penicillin-binding protein 1b. For reference purposes, the amino acid sequence of full length IC77 is SEQ ID NO: 111 herein. In the R6 genome IC77 is spr1909 [205]. The use of IC77 for immunisation is reported in reference 82 (SEQ ID NO: 232 therein).

[0605] Preferred IC77 polypeptides for use with the invention comprise an amino acid sequence: (a) having 50% or more identity (e.g. 60%, 65%, 70%, 75%, 80%, 85%, 90%, 91%, 92%, 93%, 94%, 95%, 96%, 97%, 98%, 99%, 99.5% or more) to SEQ ID NO: 111; and/or (b) comprising a fragment of at least ‘n’ consecutive amino acids of SEQ ID NO: 111, wherein ‘n’ is 7 or more (e.g. 8, 10, 12, 14, 16, 18, 20, 25, 30, 35, 40, 50, 60, 70, 80, 90, 100, 150, 200, 250 or more). These IC77 proteins include variants of SEQ ID NO: 111. Preferred fragments of (b) comprise an epitope from SEQ ID NO: 111. Other preferred fragments lack one or more amino acids (e.g. 1, 2, 3, 4, 5, 6, 7, 8, 9, 10, 15, 20, 25 or more) from the C-terminus and/or one or more amino acids (e.g. 1, 2, 3, 4, 5, 6, 7, 8, 9, 10, 15, 20, 25 or more) from the N-terminus of SEQ ID NO: 111 while retaining at least one epitope of SEQ ID NO: 111. Other fragments omit one or more protein domains. Immunogenic fragments of IC77 are identified in table 1 of reference 82.

[0606] IC78

[0607] IC78 is a ABC transporter substrate-binding protein- maltose/maltodextrin. For reference purposes, the amino acid sequence of full length IC78 is SEQ ID NO: 112 herein. In the R6 genome IC78 is spr1918 [205]. The use of IC78 for immunisation is reported in reference 82 (SEQ ID NO: 233 therein).

[0608] Preferred IC78 polypeptides for use with the invention comprise an amino acid sequence: (a) having 50% or more identity (e.g. 60%, 65%, 70%, 75%, 80%, 85%, 90%, 91%, 92%, 93%, 94%, 95%, 96%, 97%, 98%, 99%, 99.5% or more) to SEQ ID NO: 112; and/or (b) comprising a fragment of at least ‘n’ consecutive amino acids of SEQ ID NO: 112, wherein ‘n’ is 7 or more (e.g. 8, 10, 12, 14, 16, 18, 20, 25, 30, 35, 40, 50, 60, 70, 80, 90, 100, 150, 200, 250 or more). These IC78 proteins include variants of SEQ ID NO: 112. Preferred fragments of (b) comprise an epitope from SEQ ID NO: 112. Other preferred fragments lack one or more amino acids (e.g. 1, 2, 3, 4, 5, 6, 7, 8, 9, 10, 15, 20, 25 or more) from the C-terminus and/or one or more amino acids (e.g. 1, 2, 3, 4, 5, 6, 7, 8, 9, 10, 15, 20, 25 or more) from the N-terminus of SEQ ID NO: 112 while retaining at least one epitope of SEQ ID NO: 112. Other fragments omit one or more protein domains. Immunogenic fragments of IC78 are identified in table 1 of reference 82.

[0609] IC79

[0610] IC79 is annotated in reference 82 as a hypothetical protein. For reference purposes, the amino acid sequence of full length IC79 is SEQ ID NO: 113 herein. In the R6 genome IC79 is spr2120 [205]. The use of IC79 for immunisation is reported in reference 82 (SEQ ID NO: 234 therein).

[0611] Preferred IC79 polypeptides for use with the invention comprise an amino acid sequence: (a) having 50% or more identity (e.g. 60%, 65%, 70%, 75%, 80%, 85%, 90%, 91%, 92%, 93%, 94%, 95%, 96%, 97%, 98%, 99%, 99.5% or more) to SEQ ID NO: 113; and/or (b) comprising a fragment of at least ‘n’ consecutive amino acids of SEQ ID NO: 113, wherein ‘n’ is 7 or more (e.g. 8, 10, 12, 14, 16, 18, 20, 25, 30, 35, 40, 50, 60, 70, 80, 90, 100, 150, 200, 250 or more). These IC79 proteins include variants of SEQ ID NO: 113. Preferred fragments of (b) comprise an epitope from SEQ ID NO: 113. Other preferred fragments lack one or more amino acids (e.g. 1, 2, 3, 4, 5, 6, 7, 8, 9, 10, 15, 20, 25 or more) from the C-terminus and/or one or more amino acids (e.g. 1, 2, 3, 4, 5, 6, 7, 8, 9, 10, 15, 20, 25 or more) from the N-terminus of SEQ ID NO: 113 while retaining at least one epitope of SEQ ID NO: 113. Other fragments omit one or more protein domains. Immunogenic fragments of IC79 are identified in table 1 of reference 82.

[0612] IC80

[0613] IC80 is a Putative transketolase n-terminal section. For reference purposes, the amino acid sequence of full length IC80 is SEQ ID NO: 114 herein. In the R6 genome IC80 is spr1937 [205]. The use of IC80 for immunisation is reported in reference 82 (SEQ ID NO: 235 therein).

[0614] Preferred IC80 polypeptides for use with the invention comprise an amino acid sequence: (a) having 50% or more identity (e.g. 60%, 65%, 70%, 75%, 80%, 85%, 90%, 91%, 92%, 93%, 94%, 95%, 96%, 97%, 98%, 99%, 99.5% or more) to SEQ ID NO: 114; and/or (b) comprising a fragment of at least ‘n’ consecutive amino acids of SEQ ID NO: 114, wherein ‘n’ is 7 or more (e.g. 8, 10, 12, 14, 16, 18, 20, 25, 30, 35, 40, 50, 60, 70, 80, 90, 100, 150, 200, 250 or more). These IC80 proteins include variants of SEQ ID NO: 114. Preferred fragments of (b) comprise an epitope from SEQ ID NO: 114. Other preferred fragments lack one or more amino acids (e.g. 1, 2, 3, 4, 5, 6, 7, 8, 9, 10, 15, 20, 25 or more) from the C-terminus and/or one or more amino acids (e.g. 1, 2, 3, 4, 5, 6, 7, 8, 9, 10, 15, 20, 25 or more) from the N-terminus of SEQ ID NO: 114 while retaining at least one epitope of SEQ ID NO: 114. Other fragments omit one or more protein domains. Immunogenic fragments of IC80 are identified in table 1 of reference 82.

[0615] IC81

[0616] IC81 is a Choline-binding protein. For reference purposes, the amino acid sequence of full length IC81 is SEQ ID NO: 115 herein. Its C-terminus is related to IC3. The use of IC81 for immunisation is reported in reference 82 (SEQ ID NO: 236 therein).

[0617] Preferred IC81 polypeptides for use with the invention comprise an amino acid sequence: (a) having 50% or more identity (e.g. 60%, 65%, 70%, 75%, 80%, 85%, 90%, 91%, 92%, 93%, 94%, 95%, 96%, 97%, 98%, 99%, 99.5% or more) to SEQ ID NO: 115; and/or (b) comprising a fragment of at least ‘n’ consecutive amino acids of SEQ ID NO: 115, wherein ‘n’ is 7 or more (e.g. 8, 10, 12, 14, 16, 18, 20, 25, 30, 35, 40, 50, 60, 70, 80, 90, 100, 150, 200, 250 or more). These IC81 proteins include variants of SEQ ID NO: 115. Preferred fragments of (b) comprise an epitope from SEQ ID NO: 115. Other preferred fragments lack one or more amino acids (e.g. 1, 2, 3, 4, 5, 6, 7, 8, 9, 10, 15, 20, 25 or more) from the C-terminus and/or one or more amino acids (e.g. 1, 2, 3, 4, 5, 6, 7, 8, 9, 10, 15, 20, 25 or more) from the N-terminus of SEQ ID NO: 115 while retaining at least one epitope of SEQ ID NO: 115. Other fragments omit one or more protein domains. Immunogenic fragments of IC81 are identified in table 1 of reference 82.

[0618] IC82

[0619] IC82 is a glycosyl hydrolase-related protein. For reference purposes, the amino acid sequence of full length IC82 is SEQ ID NO: 116 herein. In the R6 genome IC82 is spr2141 [205]. The use of IC82 for immunisation is reported in reference 82 (SEQ ID NO: 237 therein).

[0620] Preferred IC82 polypeptides for use with the invention comprise an amino acid sequence: (a) having 50% or more identity (e.g. 60%, 65%, 70%, 75%, 80%, 85%, 90%, 91%, 92%, 93%, 94%, 95%, 96%, 97%, 98%, 99%, 99.5% or more) to SEQ ID NO: 116; and/or (b) comprising a fragment of at least ‘n’ consecutive amino acids of SEQ ID NO: 116, wherein ‘n’ is 7 or more (e.g. 8, 10, 12, 14, 16, 18, 20, 25, 30, 35, 40, 50, 60, 70, 80, 90, 100, 150, 200, 250 or more). These IC82 proteins include variants of SEQ ID NO: 116. Preferred fragments of (b) comprise an epitope from SEQ ID NO: 116. Other preferred fragments lack one or more amino acids (e.g. 1, 2, 3, 4, 5, 6, 7, 8, 9, 10, 15, 20, 25 or more) from the C-terminus and/or one or more amino acids (e.g. 1, 2, 3, 4, 5, 6, 7, 8, 9, 10, 15, 20, 25 or more) from the N-terminus of SEQ ID NO: 116 while retaining at least one epitope of SEQ ID NO: 116. Other fragments omit one or more protein domains. Immunogenic fragments of IC82 are identified in table 1 of reference 82.

[0621] IC83

[0622] IC83 is annotated in reference 82 as a hypothetical protein . For reference purposes, the amino acid sequence of full length IC83 is SEQ ID NO: 117 herein. In the R6 genome IC83 is spr1983 [205]. The use of IC83 for immunisation is reported in reference 82 (SEQ ID NO: 238 therein).

[0623] Preferred IC83 polypeptides for use with the invention comprise an amino acid sequence: (a) having 50% or more identity (e.g. 60%, 65%, 70%, 75%, 80%, 85%, 90%, 91%, 92%, 93%, 94%, 95%, 96%, 97%, 98%, 99%, 99.5% or more) to SEQ ID NO: 117; and/or (b) comprising a fragment of at least ‘n’ consecutive amino acids of SEQ ID NO: 117, wherein ‘n’ is 7 or more (e.g. 8, 10, 12, 14, 16, 18, 20, 25, 30, 35, 40, 50, 60, 70, 80, 90, 100, 150, 200, 250 or more). These IC83 proteins include variants of SEQ ID NO: 117. Preferred fragments of (b) comprise an epitope from SEQ ID NO: 117. Other preferred fragments lack one or more amino acids (e.g. 1, 2, 3, 4, 5, 6, 7, 8, 9, 10, 15, 20, 25 or more) from the C-terminus and/or one or more amino acids (e.g. 1, 2, 3, 4, 5, 6, 7, 8, 9, 10, 15, 20, 25 or more) from the N-terminus of SEQ ID NO: 117 while retaining at least one epitope of SEQ ID NO: 117. Other fragments omit one or more protein domains. Immunogenic fragments of IC83 are identified in table 1 of reference 82.

[0624] IC84

[0625] IC84 is a Class III stress response-related ATPase. For reference purposes, the amino acid sequence of full length IC84 is SEQ ID NO: 118 herein. In the R6 genome IC84 is spr2000 [205]. The use of IC84 for immunisation is reported in reference 82 (SEQ ID NO: 240 therein).

[0626] Preferred IC84 polypeptides for use with the invention comprise an amino acid sequence: (a) having 50% or more identity (e.g. 60%, 65%, 70%, 75%, 80%, 85%, 90%, 91%, 92%, 93%, 94%, 95%, 96%, 97%, 98%, 99%, 99.5% or more) to SEQ ID NO: 118; and/or (b) comprising a fragment of at least ‘n’ consecutive amino acids of SEQ ID NO: 118, wherein ‘n’ is 7 or more (e.g. 8, 10, 12, 14, 16, 18, 20, 25, 30, 35, 40, 50, 60, 70, 80, 90, 100, 150, 200, 250 or more). These IC84 proteins include variants of SEQ ID NO: 118. Preferred fragments of (b) comprise an epitope from SEQ ID NO: 118. Other preferred fragments lack one or more amino acids (e.g. 1, 2, 3, 4, 5, 6, 7, 8, 9, 10, 15, 20, 25 or more) from the C-terminus and/or one or more amino acids (e.g. 1, 2, 3, 4, 5, 6, 7, 8, 9, 10, 15, 20, 25 or more) from the N-terminus of SEQ ID NO: 118 while retaining at least one epitope of SEQ ID NO: 118. Other fragments omit one or more protein domains. Immunogenic fragments of IC84 are identified in table 1 of reference 82.

[0627] IC85

[0628] IC85 is a variant of SEQ ID NO: 23, mentioned above (SEQ ID NO: 119). Useful IC85 polypeptides for use with the invention comprise an amino acid sequence: (a) having 50% or more identity (e.g. 60%, 65%, 70%, 75%, 80%, 85%, 90%, 91%, 92%, 93%, 94%, 95%, 96%, 97%, 98%, 99%, 99.5% or more) to SEQ ID NO: 119; and/or (b) comprising a fragment of at least ‘n’ consecutive amino acids of SEQ ID NO: 119, wherein ‘n’ is 7 or more (e.g. 8, 10, 12, 14, 16, 18, 20, 25, 30, 35, 40, 50, 60, 70, 80, 90, 100, 150, 200, 250 or more). These IC85 proteins include variants of SEQ ID NO: 119. Preferred fragments of (b) comprise an epitope from SEQ ID NO: 119. Other preferred fragments lack one or more amino acids (e.g. 1, 2, 3, 4, 5, 6, 7, 8, 9, 10, 15, 20, 25 or more) from the C-terminus and/or one or more amino acids (e.g. 1, 2, 3, 4, 5, 6, 7, 8, 9, 10, 15, 20, 25 or more) from the N-terminus of SEQ ID NO: 119 while retaining at least one epitope of SEQ ID NO: 119. Other fragments omit one or more protein domains.

[0629] IC86

[0630] IC86 is a 50S ribosomal protein L9. For reference purposes, the amino acid sequence of full length IC86 is SEQ ID NO: 120 herein. In the R6 genome IC86 is spr2009 [205]. The use of IC86 for immunisation is reported in reference 82 (SEQ ID NO: 242 therein).

[0631] Preferred IC86 polypeptides for use with the invention comprise an amino acid sequence: (a) having 50% or more identity (e.g. 60%, 65%, 70%, 75%, 80%, 85%, 90%, 91%, 92%, 93%, 94%, 95%, 96%, 97%, 98%, 99%, 99.5% or more) to SEQ ID NO: 120; and/or (b) comprising a fragment of at least ‘n’ consecutive amino acids of SEQ ID NO: 120, wherein ‘n’ is 7 or more (e.g. 8, 10, 12, 14, 16, 18, 20, 25, 30, 35, 40, 50, 60, 70, 80, 90, 100, 150, 200, 250 or more). These IC86 proteins include variants of SEQ ID NO: 120. Preferred fragments of (b) comprise an epitope from SEQ ID NO: 120. Other preferred fragments lack one or more amino acids (e.g. 1, 2, 3, 4, 5, 6, 7, 8, 9, 10, 15, 20, 25 or more) from the C-terminus and/or one or more amino acids (e.g. 1, 2, 3, 4, 5, 6, 7, 8, 9, 10, 15, 20, 25 or more) from the N-terminus of SEQ ID NO: 120 while retaining at least one epitope of SEQ ID NO: 120. Other fragments omit one or more protein domains. Immunogenic fragments of IC86 are identified in table 1 of reference 82.

[0632] IC87

[0633] IC87 is annotated in reference 82 as a hypothetical protein. For reference purposes, the amino acid sequence of full length IC87 is SEQ ID NO: 166 herein. In the R6 genome IC87 is spr0987 [205]. The use of IC87 for immunisation is reported in reference 82 (SEQ ID NO: 288 therein).

[0634] Preferred IC87 polypeptides for use with the invention comprise an amino acid sequence: (a) having 50% or more identity (e.g. 60%, 65%, 70%, 75%, 80%, 85%, 90%, 91%, 92%, 93%, 94%, 95%, 96%, 97%, 98%, 99%, 99.5% or more) to SEQ ID NO: 166; and/or (b) comprising a fragment of at least ‘n’ consecutive amino acids of SEQ ID NO: 166, wherein ‘n’ is 7 or more (e.g. 8, 10, 12, 14, 16, 18, 20, 25, 30, 35, 40, 50, 60, 70, 80, 90, 100, 150, 200, 250 or more). These IC87 proteins include variants of SEQ ID NO: 166. Preferred fragments of (b) comprise an epitope from SEQ ID NO: 166. Other preferred fragments lack one or more amino acids (e.g. 1, 2, 3, 4, 5, 6, 7, 8, 9, 10, 15, 20, 25 or more) from the C-terminus and/or one or more amino acids (e.g. 1, 2, 3, 4, 5, 6, 7, 8, 9, 10, 15, 20, 25 or more) from the N-terminus of SEQ ID NO: 166 while retaining at least one epitope of SEQ ID NO: 166. Other fragments omit one or more protein domains. Immunogenic fragments of IC87 are identified in table 1 of reference 82.

[0635] IC88

[0636] IC88 is a Choline binding protein. For reference purposes, the amino acid sequence of full length IC88 is SEQ ID NO: 122 herein. In the R6 genome IC88 is spr1274 [205]. The use of IC88 for immunisation is reported in reference 82 (SEQ ID NO: 244 therein).

[0637] Preferred IC88 polypeptides for use with the invention comprise an amino acid sequence: (a) having 50% or more identity (e.g. 60%, 65%, 70%, 75%, 80%, 85%, 90%, 91%, 92%, 93%, 94%, 95%, 96%, 97%, 98%, 99%, 99.5% or more) to SEQ ID NO: 122; and/or (b) comprising a fragment of at least ‘n’ consecutive amino acids of SEQ ID NO: 122, wherein ‘n’ is 7 or more (e.g. 8, 10, 12, 14, 16, 18, 20, 25, 30, 35, 40, 50, 60, 70, 80, 90, 100, 150, 200, 250 or more). These IC88 proteins include variants of SEQ ID NO: 122. Preferred fragments of (b) comprise an epitope from SEQ ID NO: 122. Other preferred fragments lack one or more amino acids (e.g. 1, 2, 3, 4, 5, 6, 7, 8, 9, 10, 15, 20, 25 or more) from the C-terminus and/or one or more amino acids (e.g. 1, 2, 3, 4, 5, 6, 7, 8, 9, 10, 15, 20, 25 or more) from the N-terminus of SEQ ID NO: 122 while retaining at least one epitope of SEQ ID NO: 122. Other fragments omit one or more protein domains. Immunogenic fragments of IC88 are identified in table 1 of reference 82.

[0638] IC89

[0639] IC89 is annotated in reference 82 as a hypothetical protein. For reference purposes, the amino acid sequence of full length IC89 is SEQ ID NO: 123 herein. The use of IC89 for immunisation is reported in reference 82 (SEQ ID NO: 245 therein).

[0640] Preferred IC89 polypeptides for use with the invention comprise an amino acid sequence: (a) having 50% or more identity (e.g. 60%, 65%, 70%, 75%, 80%, 85%, 90%, 91%, 92%, 93%, 94%, 95%, 96%, 97%, 98%, 99%, 99.5% or more) to SEQ ID NO: 123; and/or (b) comprising a fragment of at least ‘n’ consecutive amino acids of SEQ ID NO: 123, wherein ‘n’ is 7 or more (e.g. 8, 10, 12, 14, 16, 18, 20, 25, 30, 35, 40, 50, 60, 70, 80, 90, 100, 150, 200, 250 or more). These IC89 proteins include variants of SEQ ID NO: 123. Preferred fragments of (b) comprise an epitope from SEQ ID NO: 123. Other preferred fragments lack one or more amino acids (e.g. 1, 2, 3, 4, 5, 6, 7, 8, 9, 10, 15, 20, 25 or more) from the C-terminus and/or one or more amino acids (e.g. 1, 2, 3, 4, 5, 6, 7, 8, 9, 10, 15, 20, 25 or more) from the N-terminus of SEQ ID NO: 123 while retaining at least one epitope of SEQ ID NO: 123. Other fragments omit one or more protein domains. Immunogenic fragments of IC89 are identified in table 1 of reference 82.

[0641] IC90

[0642] IC90 is annotated in reference 82 as a hypothetical protein. For reference purposes, the amino acid sequence of full length IC90 is SEQ ID NO: 124 herein. The use of IC90 for immunisation is reported in reference 82 (SEQ ID NO: 246 therein).

[0643] Preferred IC90 polypeptides for use with the invention comprise an amino acid sequence: (a) having 50% or more identity (e.g. 60%, 65%, 70%, 75%, 80%, 85%, 90%, 91%, 92%, 93%, 94%, 95%, 96%, 97%, 98%, 99%, 99.5% or more) to SEQ ID NO: 124; and/or (b) comprising a fragment of at least ‘n’ consecutive amino acids of SEQ ID NO: 124, wherein ‘n’ is 7 or more (e.g. 8, 10, 12, 14, 16, 18, 20, 25, 30, 35, 40, 50, 60, 70, 80, 90, 100, 150, 200, 250 or more). These IC90 proteins include variants of SEQ ID NO: 124. Preferred fragments of (b) comprise an epitope from SEQ ID NO: 124. Other preferred fragments lack one or more amino acids (e.g. 1, 2, 3, 4, 5, 6, 7, 8, 9, 10, 15, 20, 25 or more) from the C-terminus and/or one or more amino acids (e.g. 1, 2, 3, 4, 5, 6, 7, 8, 9, 10, 15, 20, 25 or more) from the N-terminus of SEQ ID NO: 124 while retaining at least one epitope of SEQ ID NO: 124. Other fragments omit one or more protein domains. Immunogenic fragments of IC90 are identified in table 1 of reference 82.

[0644] IC91

[0645] IC91 is annotated in reference 82 as a hypothetical protein. For reference purposes, the amino acid sequence of full length IC91 is SEQ ID NO: 125 herein. In the R6 genome IC91 is spr0415 [205]. The use of IC91 for immunisation is reported in reference 82 (SEQ ID NO: 247 therein).

[0646] Preferred IC91 polypeptides for use with the invention comprise an amino acid sequence: (a) having 50% or more identity (e.g. 60%, 65%, 70%, 75%, 80%, 85%, 90%, 91%, 92%, 93%, 94%, 95%, 96%, 97%, 98%, 99%, 99.5% or more) to SEQ ID NO: 125; and/or (b) comprising a fragment of at least ‘n’ consecutive amino acids of SEQ ID NO: 125, wherein ‘n’ is 7 or more (e.g. 8, 10, 12, 14, 16, 18, 20, 25, 30, 35, 40, 50, 60, 70, 80, 90, 100, 150, 200, 250 or more). These IC91 proteins include variants of SEQ ID NO: 125. Preferred fragments of (b) comprise an epitope from SEQ ID NO: 125. Other preferred fragments lack one or more amino acids (e.g. 1, 2, 3, 4, 5, 6, 7, 8, 9, 10, 15, 20, 25 or more) from the C-terminus and/or one or more amino acids (e.g. 1, 2, 3, 4, 5, 6, 7, 8, 9, 10, 15, 20, 25 or more) from the N-terminus of SEQ ID NO: 125 while retaining at least one epitope of SEQ ID NO: 125. Other fragments omit one or more protein domains. Immunogenic fragments of IC91 are identified in table 1 of reference 82.

[0647] IC92

[0648] IC92 is annotated in reference 82 as a hypothetical protein. For reference purposes, the amino acid sequence of full length IC92 is SEQ ID NO: 126 herein. In the R6 genome IC92 is spr0695 [205]. The use of IC92 for immunisation is reported in reference 82 (SEQ ID NO: 248 therein).

[0649] Preferred IC92 polypeptides for use with the invention comprise an amino acid sequence: (a) having 50% or more identity (e.g. 60%, 65%, 70%, 75%, 80%, 85%, 90%, 91%, 92%, 93%, 94%, 95%, 96%, 97%, 98%, 99%, 99.5% or more) to SEQ ID NO: 126; and/or (b) comprising a fragment of at least ‘n’ consecutive amino acids of SEQ ID NO: 126, wherein ‘n’ is 7 or more (e.g. 8, 10, 12, 14, 16, 18, 20, 25, 30, 35, 40, 50, 60, 70, 80, 90, 100, 150, 200, 250 or more). These IC92 proteins include variants of SEQ ID NO: 126. Preferred fragments of (b) comprise an epitope from SEQ ID NO: 126. Other preferred fragments lack one or more amino acids (e.g. 1, 2, 3, 4, 5, 6, 7, 8, 9, 10, 15, 20, 25 or more) from the C-terminus and/or one or more amino acids (e.g. 1, 2, 3, 4, 5, 6, 7, 8, 9, 10, 15, 20, 25 or more) from the N-terminus of SEQ ID NO: 126 while retaining at least one epitope of SEQ ID NO: 126. Other fragments omit one or more protein domains. Immunogenic fragments of IC92 are identified in table 1 of reference 82.

[0650] IC93

[0651] IC93 is annotated in reference 82 as a hypothetical protein. For reference purposes, the amino acid sequence of full length IC93 is SEQ ID NO: 127 herein. In the R6 genome IC93 is spr1334 [205]. The use of IC93 for immunisation is reported in reference 82 (SEQ ID NO: 249 therein).

[0652] Preferred IC93 polypeptides for use with the invention comprise an amino acid sequence: (a) having 50% or more identity (e.g. 60%, 65%, 70%, 75%, 80%, 85%, 90%, 91%, 92%, 93%, 94%, 95%, 96%, 97%, 98%, 99%, 99.5% or more) to SEQ ID NO: 127; and/or (b) comprising a fragment of at least ‘n’ consecutive amino acids of SEQ ID NO: 127, wherein ‘n’ is 7 or more (e.g. 8, 10, 12, 14, 16, 18, 20, 25, 30, 35, 40, 50, 60, 70, 80, 90, 100, 150, 200, 250 or more). These IC93 proteins include variants of SEQ ID NO: 127. Preferred fragments of (b) comprise an epitope from SEQ ID NO: 127. Other preferred fragments lack one or more amino acids (e.g. 1, 2, 3, 4, 5, 6, 7, 8, 9, 10, 15, 20, 25 or more) from the C-terminus and/or one or more amino acids (e.g. 1, 2, 3, 4, 5, 6, 7, 8, 9, 10, 15, 20, 25 or more) from the N-terminus of SEQ ID NO: 127 while retaining at least one epitope of SEQ ID NO: 127. Other fragments omit one or more protein domains. Immunogenic fragments of IC93 are identified in table 1 of reference 82.

[0653] IC94

[0654] IC94 is annotated in reference 82 as a hypothetical protein. For reference purposes, the amino acid sequence of full length IC94 is SEQ ID NO: 128 herein. In the R6 genome IC94 is spr0242 [205]. The use of IC94 for immunisation is reported in reference 82 (SEQ ID NO: 250 therein).

[0655] Preferred IC94 polypeptides for use with the invention comprise an amino acid sequence: (a) having 50% or more identity (e.g. 60%, 65%, 70%, 75%, 80%, 85%, 90%, 91%, 92%, 93%, 94%, 95%, 96%, 97%, 98%, 99%, 99.5% or more) to SEQ ID NO: 128; and/or (b) comprising a fragment of at least ‘n’ consecutive amino acids of SEQ ID NO: 128, wherein ‘n’ is 7 or more (e.g. 8, 10, 12, 14, 16, 18, 20, 25, 30, 35, 40, 50, 60, 70, 80, 90, 100, 150, 200, 250 or more). These IC94 proteins include variants of SEQ ID NO: 128. Preferred fragments of (b) comprise an epitope from SEQ ID NO: 128. Other preferred fragments lack one or more amino acids (e.g. 1, 2, 3, 4, 5, 6, 7, 8, 9, 10, 15, 20, 25 or more) from the C-terminus and/or one or more amino acids (e.g. 1, 2, 3, 4, 5, 6, 7, 8, 9, 10, 15, 20, 25 or more) from the N-terminus of SEQ ID NO: 128 while retaining at least one epitope of SEQ ID NO: 128. Other fragments omit one or more protein domains. Immunogenic fragments of IC94 are identified in table 1 of reference 82.

[0656] IC95

[0657] IC95 is annotated in reference 82 as a hypothetical protein. For reference purposes, the amino acid sequence of full length IC95 is SEQ ID NO: 129 herein. In the R6 genome IC95 is spr1367 [205]. The use of IC95 for immunisation is reported in reference 82 (SEQ ID NO: 251 therein).

[0658] Preferred IC95 polypeptides for use with the invention comprise an amino acid sequence: (a) having 50% or more identity (e.g. 60%, 65%, 70%, 75%, 80%, 85%, 90%, 91%, 92%, 93%, 94%, 95%, 96%, 97%, 98%, 99%, 99.5% or more) to SEQ ID NO: 129; and/or (b) comprising a fragment of at least ‘n’ consecutive amino acids of SEQ ID NO: 129, wherein ‘n’ is 7 or more (e.g. 8, 10, 12, 14, 16, 18, 20, 25, 30, 35, 40, 50, 60, 70, 80, 90, 100, 150, 200, 250 or more). These IC95 proteins include variants of SEQ ID NO: 129. Preferred fragments of (b) comprise an epitope from SEQ ID NO: 129. Other preferred fragments lack one or more amino acids (e.g. 1, 2, 3, 4, 5, 6, 7, 8, 9, 10, 15, 20, 25 or more) from the C-terminus and/or one or more amino acids (e.g. 1, 2, 3, 4, 5, 6, 7, 8, 9, 10, 15, 20, 25 or more) from the N-terminus of SEQ ID NO: 129 while retaining at least one epitope of SEQ ID NO: 129. Other fragments omit one or more protein domains. Immunogenic fragments of IC95 are identified in table 1 of reference 82.

[0659] IC96

[0660] IC96 is annotated in reference 82 as a hypothetical protein. For reference purposes, the amino acid sequence of full length IC96 is SEQ ID NO: 130 herein. The use of IC96 for immunisation is reported in reference 82 (SEQ ID NO: 252 therein).

[0661] Preferred IC96 polypeptides for use with the invention comprise an amino acid sequence: (a) having 50% or more identity (e.g. 60%, 65%, 70%, 75%, 80%, 85%, 90%, 91%, 92%, 93%, 94%, 95%, 96%, 97%, 98%, 99%, 99.5% or more) to SEQ ID NO: 130; and/or (b) comprising a fragment of at least ‘n’ consecutive amino acids of SEQ ID NO: 130, wherein ‘n’ is 7 or more (e.g. 8, 10, 12, 14, 16, 18, 20, 25, 30, 35, 40, 50, 60, 70, 80, 90, 100, 150, 200, 250 or more). These IC96 proteins include variants of SEQ ID NO: 130. Preferred fragments of (b) comprise an epitope from SEQ ID NO: 130. Other preferred fragments lack one or more amino acids (e.g. 1, 2, 3, 4, 5, 6, 7, 8, 9, 10, 15, 20, 25 or more) from the C-terminus and/or one or more amino acids (e.g. 1, 2, 3, 4, 5, 6, 7, 8, 9, 10, 15, 20, 25 or more) from the N-terminus of SEQ ID NO: 130 while retaining at least one epitope of SEQ ID NO: 130. Other fragments omit one or more protein domains. Immunogenic fragments of IC96 are identified in table 1 of reference 82.

[0662] IC97

[0663] IC97 is annotated in reference 82 as a hypothetical protein. For reference purposes, the amino acid sequence of full length IC97 is SEQ ID NO: 131 herein. In the R6 genome IC97 is spr1502 [205]. The use of IC97 for immunisation is reported in reference 82 (SEQ ID NO: 253 therein).

[0664] Preferred IC97 polypeptides for use with the invention comprise an amino acid sequence: (a) having 50% or more identity (e.g. 60%, 65%, 70%, 75%, 80%, 85%, 90%, 91%, 92%, 93%, 94%, 95%, 96%, 97%, 98%, 99%, 99.5% or more) to SEQ ID NO: 131; and/or (b) comprising a fragment of at least ‘n’ consecutive amino acids of SEQ ID NO: 131, wherein ‘n’ is 7 or more (e.g. 8, 10, 12, 14, 16, 18, 20, 25, 30, 35, 40, 50, 60, 70, 80, 90, 100, 150, 200, 250 or more). These IC97 proteins include variants of SEQ ID NO: 131. Preferred fragments of (b) comprise an epitope from SEQ ID NO: 131. Other preferred fragments lack one or more amino acids (e.g. 1, 2, 3, 4, 5, 6, 7, 8, 9, 10, 15, 20, 25 or more) from the C-terminus and/or one or more amino acids (e.g. 1, 2, 3, 4, 5, 6, 7, 8, 9, 10, 15, 20, 25 or more) from the N-terminus of SEQ ID NO: 131 while retaining at least one epitope of SEQ ID NO: 131. Other fragments omit one or more protein domains. Immunogenic fragments of IC97 are identified in table 1 of reference 82.

[0665] IC98

[0666] IC98 is annotated in reference 82 as a hypothetical protein. For reference purposes, the amino acid sequence of full length IC98 is SEQ ID NO: 132 herein. In the R6 genome IC98 is spr0730 [205]. The use of IC98 for immunisation is reported in reference 82 (SEQ ID NO: 254 therein).

[0667] Preferred IC98 polypeptides for use with the invention comprise an amino acid sequence: (a) having 50% or more identity (e.g. 60%, 65%, 70%, 75%, 80%, 85%, 90%, 91%, 92%, 93%, 94%, 95%, 96%, 97%, 98%, 99%, 99.5% or more) to SEQ ID NO: 132; and/or (b) comprising a fragment of at least ‘n’ consecutive amino acids of SEQ ID NO: 132, wherein ‘n’ is 7 or more (e.g. 8, 10, 12, 14, 16, 18, 20, 25, 30, 35, 40, 50, 60, 70, 80, 90, 100, 150, 200, 250 or more). These IC98 proteins include variants of SEQ ID NO: 132. Preferred fragments of (b) comprise an epitope from SEQ ID NO: 132. Other preferred fragments lack one or more amino acids (e.g. 1, 2, 3, 4, 5, 6, 7, 8, 9, 10, 15, 20, 25 or more) from the C-terminus and/or one or more amino acids (e.g. 1, 2, 3, 4, 5, 6, 7, 8, 9, 10, 15, 20, 25 or more) from the N-terminus of SEQ ID NO: 132 while retaining at least one epitope of SEQ ID NO: 132. Other fragments omit one or more protein domains. Immunogenic fragments of IC98 are identified in table 1 of reference 82.

[0668] IC99

[0669] IC99 is annotated in reference 82 as a hypothetical protein. For reference purposes, the amino acid sequence of full length IC99 is SEQ ID NO: 133 herein. In the R6 genome IC99 is spr1961 [205]. The use of IC99 for immunisation is reported in reference 82 (SEQ ID NO: 255 therein).

[0670] Preferred IC99 polypeptides for use with the invention comprise an amino acid sequence: (a) having 50% or more identity (e.g. 60%, 65%, 70%, 75%, 80%, 85%, 90%, 91%, 92%, 93%, 94%, 95%, 96%, 97%, 98%, 99%, 99.5% or more) to SEQ ID NO: 133; and/or (b) comprising a fragment of at least ‘n’ consecutive amino acids of SEQ ID NO: 133, wherein ‘n’ is 7 or more (e.g. 8, 10, 12, 14, 16, 18, 20, 25, 30, 35, 40, 50, 60, 70, 80, 90, 100, 150, 200, 250 or more). These IC99 proteins include variants of SEQ ID NO: 133. Preferred fragments of (b) comprise an epitope from SEQ ID NO: 133. Other preferred fragments lack one or more amino acids (e.g. 1, 2, 3, 4, 5, 6, 7, 8, 9, 10, 15, 20, 25 or more) from the C-terminus and/or one or more amino acids (e.g. 1, 2, 3, 4, 5, 6, 7, 8, 9, 10, 15, 20, 25 or more) from the N-terminus of SEQ ID NO: 133 while retaining at least one epitope of SEQ ID NO: 133. Other fragments omit one or more protein domains. Immunogenic fragments of IC99 are identified in table 1 of reference 82.

[0671] IC100

[0672] IC100 is annotated in reference 82 as a hypothetical protein. For reference purposes, the amino acid sequence of full length IC100 is SEQ ID NO: 134 herein. The use of IC100 for immunisation is reported in reference 82 (SEQ ID NO: 256 therein).

[0673] Preferred IC100 polypeptides for use with the invention comprise an amino acid sequence: (a) having 50% or more identity (e.g. 60%, 65%, 70%, 75%, 80%, 85%, 90%, 91%, 92%, 93%, 94%, 95%, 96%, 97%, 98%, 99%, 99.5% or more) to SEQ ID NO: 134; and/or (b) comprising a fragment of at least ‘n’ consecutive amino acids of SEQ ID NO: 134, wherein ‘n’ is 7 or more (e.g. 8, 10, 12, 14, 16, 18, 20, 25, 30, 35, 40, 50, 60, 70, 80, 90, 100, 150, 200, 250 or more). These IC100 proteins include variants of SEQ ID NO: 134. Preferred fragments of (b) comprise an epitope from SEQ ID NO: 134. Other preferred fragments lack one or more amino acids (e.g. 1, 2, 3, 4, 5, 6, 7, 8, 9, 10, 15, 20, 25 or more) from the C-terminus and/or one or more amino acids (e.g. 1, 2, 3, 4, 5, 6, 7, 8, 9, 10, 15, 20, 25 or more) from the N-terminus of SEQ ID NO: 134 while retaining at least one epitope of SEQ ID NO: 134. Other fragments omit one or more protein domains. Immunogenic fragments of IC 100 are identified in table 1 of reference 82.

[0674] IC101

[0675] IC101 is annotated in reference 82 as a hypothetical protein. For reference purposes, the amino acid sequence of full length IC101 is SEQ ID NO: 135 herein. In the R6 genome IC101 is spr0516 [205]. The use of IC101 for immunisation is reported in reference 82 (SEQ ID NO: 257 therein).

[0676] Preferred IC101 polypeptides for use with the invention comprise an amino acid sequence: (a) having 50% or more identity (e.g. 60%, 65%, 70%, 75%, 80%, 85%, 90%, 91%, 92%, 93%, 94%, 95%, 96%, 97%, 98%, 99%, 99.5% or more) to SEQ ID NO: 135; and/or (b) comprising a fragment of at least ‘n’ consecutive amino acids of SEQ ID NO: 135, wherein ‘n’ is 7 or more (e.g. 8, 10, 12, 14, 16, 18, 20, 25, 30, 35, 40, 50, 60, 70, 80, 90, 100, 150, 200, 250 or more). These IC101 proteins include variants of SEQ ID NO: 135. Preferred fragments of (b) comprise an epitope from SEQ ID NO: 135. Other preferred fragments lack one or more amino acids (e.g. 1, 2, 3, 4, 5, 6, 7, 8, 9, 10, 15, 20, 25 or more) from the C-terminus and/or one or more amino acids (e.g. 1, 2, 3, 4, 5, 6, 7, 8, 9, 10, 15, 20, 25 or more) from the N-terminus of SEQ ID NO: 135 while retaining at least one epitope of SEQ ID NO: 135. Other fragments omit one or more protein domains. Immunogenic fragments of IC101 are identified in table 1 of reference 82.

[0677] IC102

[0678] IC102 is annotated in reference 82 as a hypothetical protein. For reference purposes, the amino acid sequence of full length IC102 is SEQ ID NO: 136 herein. In the R6 genome IC102 is spr1785 [205]. The use of IC102 for immunisation is reported in reference 82 (SEQ ID NO: 258 therein).

[0679] Preferred IC102 polypeptides for use with the invention comprise an amino acid sequence: (a) having 50% or more identity (e.g. 60%, 65%, 70%, 75%, 80%, 85%, 90%, 91%, 92%, 93%, 94%, 95%, 96%, 97%, 98%, 99%, 99.5% or more) to SEQ ID NO: 136; and/or (b) comprising a fragment of at least ‘n’ consecutive amino acids of SEQ ID NO: 136, wherein ‘n’ is 7 or more (e.g. 8, 10, 12, 14, 16, 18, 20, 25, 30, 35, 40, 50, 60, 70, 80, 90, 100, 150, 200, 250 or more). These IC102 proteins include variants of SEQ ID NO: 136. Preferred fragments of (b) comprise an epitope from SEQ ID NO: 136. Other preferred fragments lack one or more amino acids (e.g. 1, 2, 3, 4, 5, 6, 7, 8, 9, 10, 15, 20, 25 or more) from the C-terminus and/or one or more amino acids (e.g. 1, 2, 3, 4, 5, 6, 7, 8, 9, 10, 15, 20, 25 or more) from the N-terminus of SEQ ID NO: 136 while retaining at least one epitope of SEQ ID NO: 136. Other fragments omit one or more protein domains. Immunogenic fragments of IC102 are identified in table 1 of reference 82.

[0680] IC103

[0681] IC103 is annotated in reference 82 as a hypothetical protein. For reference purposes, the amino acid sequence of full length IC103 is SEQ ID NO: 137 herein. In the R6 genome IC103 is spr0215 [205]. The use of IC103 for immunisation is reported in reference 82 (SEQ ID NO: 259 therein).

[0682] Preferred IC103 polypeptides for use with the invention comprise an amino acid sequence: (a) having 50% or more identity (e.g. 60%, 65%, 70%, 75%, 80%, 85%, 90%, 91%, 92%, 93%, 94%, 95%, 96%, 97%, 98%, 99%, 99.5% or more) to SEQ ID NO: 137; and/or (b) comprising a fragment of at least ‘n’ consecutive amino acids of SEQ ID NO: 137, wherein ‘n’ is 7 or more (e.g. 8, 10, 12, 14, 16, 18, 20, 25, 30, 35, 40, 50, 60, 70, 80, 90, 100, 150, 200, 250 or more). These IC103 proteins include variants of SEQ ID NO: 137. Preferred fragments of (b) comprise an epitope from SEQ ID NO: 137. Other preferred fragments lack one or more amino acids (e.g. 1, 2, 3, 4, 5, 6, 7, 8, 9, 10, 15, 20, 25 or more) from the C-terminus and/or one or more amino acids (e.g. 1, 2, 3, 4, 5, 6, 7, 8, 9, 10, 15, 20, 25 or more) from the N-terminus of SEQ ID NO: 137 while retaining at least one epitope of SEQ ID NO: 137. Other fragments omit one or more protein domains. Immunogenic fragments of IC 103 are identified in table 1 of reference 82.

[0683] IC104

[0684] IC104 is annotated in reference 82 as a hypothetical protein. For reference purposes, the amino acid sequence of full length IC104 is SEQ ID NO: 138 herein. In the R6 genome IC104 is spr1815 [205]. The use of IC104 for immunisation is reported in reference 82 (SEQ ID NO: 260 therein).

[0685] Preferred IC104 polypeptides for use with the invention comprise an amino acid sequence: (a) having 50% or more identity (e.g. 60%, 65%, 70%, 75%, 80%, 85%, 90%, 91%, 92%, 93%, 94%, 95%, 96%, 97%, 98%, 99%, 99.5% or more) to SEQ ID NO: 138; and/or (b) comprising a fragment of at least ‘n’ consecutive amino acids of SEQ ID NO: 138, wherein ‘n’ is 7 or more (e.g. 8, 10, 12, 14, 16, 18, 20, 25, 30, 35, 40, 50, 60, 70, 80, 90, 100, 150, 200, 250 or more). These IC104 proteins include variants of SEQ ID NO: 138. Preferred fragments of (b) comprise an epitope from SEQ ID NO: 138. Other preferred fragments lack one or more amino acids (e.g. 1, 2, 3, 4, 5, 6, 7, 8, 9, 10, 15, 20, 25 or more) from the C-terminus and/or one or more amino acids (e.g. 1, 2, 3, 4, 5, 6, 7, 8, 9, 10, 15, 20, 25 or more) from the N-terminus of SEQ ID NO: 138 while retaining at least one epitope of SEQ ID NO: 138. Other fragments omit one or more protein domains. Immunogenic fragments of IC104 are identified in table 1 of reference 82.

[0686] IC105

[0687] IC105 is annotated in reference 82 as a hypothetical protein. For reference purposes, the amino acid sequence of full length IC105 is SEQ ID NO: 139 herein. In the R6 genome IC105 is spr0102 [205]. The use of IC105 for immunisation is reported in reference 82 (SEQ ID NO: 261 therein).

[0688] Preferred IC105 polypeptides for use with the invention comprise an amino acid sequence: (a) having 50% or more identity (e.g. 60%, 65%, 70%, 75%, 80%, 85%, 90%, 91%, 92%, 93%, 94%, 95%, 96%, 97%, 98%, 99%, 99.5% or more) to SEQ ID NO: 139; and/or (b) comprising a fragment of at least ‘n’ consecutive amino acids of SEQ ID NO: 139, wherein ‘n’ is 7 or more (e.g. 8, 10, 12, 14, 16, 18, 20, 25, 30, 35, 40, 50, 60, 70, 80, 90, 100, 150, 200, 250 or more). These IC105 proteins include variants of SEQ ID NO: 139. Preferred fragments of (b) comprise an epitope from SEQ ID NO: 139. Other preferred fragments lack one or more amino acids (e.g. 1, 2, 3, 4, 5, 6, 7, 8, 9, 10, 15, 20, 25 or more) from the C-terminus and/or one or more amino acids (e.g. 1, 2, 3, 4, 5, 6, 7, 8, 9, 10, 15, 20, 25 or more) from the N-terminus of SEQ ID NO: 139 while retaining at least one epitope of SEQ ID NO: 139. Other fragments omit one or more protein domains. Immunogenic fragments of IC105 are identified in table 1 of reference 82.

[0689] IC106

[0690] IC106 is annotated in reference 82 as a hypothetical protein. For reference purposes, the amino acid sequence of full length IC106 is SEQ ID NO: 140 herein. In the R6 genome IC106 is spr1994 [205]. The use of IC106 for immunisation is reported in reference 82 (SEQ ID NO: 262 therein).

[0691] Preferred IC106 polypeptides for use with the invention comprise an amino acid sequence: (a) having 50% or more identity (e.g. 60%, 65%, 70%, 75%, 80%, 85%, 90%, 91%, 92%, 93%, 94%, 95%, 96%, 97%, 98%, 99%, 99.5% or more) to SEQ ID NO: 140; and/or (b) comprising a fragment of at least ‘n’ consecutive amino acids of SEQ ID NO: 140, wherein ‘n’ is 7 or more (e.g. 8, 10, 12, 14, 16, 18, 20, 25, 30, 35, 40, 50, 60, 70, 80, 90, 100, 150, 200, 250 or more). These IC106 proteins include variants of SEQ ID NO: 140. Preferred fragments of (b) comprise an epitope from SEQ ID NO: 140. Other preferred fragments lack one or more amino acids (e.g. 1, 2, 3, 4, 5, 6, 7, 8, 9, 10, 15, 20, 25 or more) from the C-terminus and/or one or more amino acids (e.g. 1, 2, 3, 4, 5, 6, 7, 8, 9, 10, 15, 20, 25 or more) from the N-terminus of SEQ ID NO: 140 while retaining at least one epitope of SEQ ID NO: 140. Other fragments omit one or more protein domains. Immunogenic fragments of IC 106 are identified in table 1 of reference 82.

[0692] IC107

[0693] IC107 is annotated in reference 82 as a hypothetical protein. For reference purposes, the amino acid sequence of full length IC107 is SEQ ID NO: 141 herein. The use of IC107 for immunisation is reported in reference 82 (SEQ ID NO: 263 therein).

[0694] Preferred IC107 polypeptides for use with the invention comprise an amino acid sequence: (a) having 50% or more identity (e.g. 60%, 65%, 70%, 75%, 80%, 85%, 90%, 91%, 92%, 93%, 94%, 95%, 96%, 97%, 98%, 99%, 99.5% or more) to SEQ ID NO: 141; and/or (b) comprising a fragment of at least ‘n’ consecutive amino acids of SEQ ID NO: 141, wherein ‘n’ is 7 or more (e.g. 8, 10, 12, 14, 16, 18, 20, 25, 30, 35, 40, 50, 60, 70, 80, 90, 100, 150, 200, 250 or more). These IC107 proteins include variants of SEQ ID NO: 141. Preferred fragments of (b) comprise an epitope from SEQ ID NO: 141. Other preferred fragments lack one or more amino acids (e.g. 1, 2, 3, 4, 5, 6, 7, 8, 9, 10, 15, 20, 25 or more) from the C-terminus and/or one or more amino acids (e.g. 1, 2, 3, 4, 5, 6, 7, 8, 9, 10, 15, 20, 25 or more) from the N-terminus of SEQ ID NO: 141 while retaining at least one epitope of SEQ ID NO: 141. Other fragments omit one or more protein domains. Immunogenic fragments of IC 107 are identified in table 1 of reference 82.

[0695] IC108

[0696] IC108 is annotated in reference 82 as a hypothetical protein. For reference purposes, the amino acid sequence of full length IC108 is SEQ ID NO: 142 herein. The use of IC108 for immunisation is reported in reference 82 (SEQ ID NO: 264 therein).

[0697] Preferred IC108 polypeptides for use with the invention comprise an amino acid sequence: (a) having 50% or more identity (e.g. 60%, 65%, 70%, 75%, 80%, 85%, 90%, 91%, 92%, 93%, 94%, 95%, 96%, 97%, 98%, 99%, 99.5% or more) to SEQ ID NO: 142; and/or (b) comprising a fragment of at least ‘n’ consecutive amino acids of SEQ ID NO: 142, wherein ‘n’ is 7 or more (e.g. 8, 10, 12, 14, 16, 18, 20, 25, 30, 35, 40, 50, 60, 70, 80, 90, 100, 150, 200, 250 or more). These IC108 proteins include variants of SEQ ID NO: 142. Preferred fragments of (b) comprise an epitope from SEQ ID NO: 142. Other preferred fragments lack one or more amino acids (e.g. 1, 2, 3, 4, 5, 6, 7, 8, 9, 10, 15, 20, 25 or more) from the C-terminus and/or one or more amino acids (e.g. 1, 2, 3, 4, 5, 6, 7, 8, 9, 10, 15, 20, 25 or more) from the N-terminus of SEQ ID NO: 142 while retaining at least one epitope of SEQ ID NO: 142. Other fragments omit one or more protein domains. Immunogenic fragments of IC 108 are identified in table 1 of reference 82.

[0698] IC109

[0699] IC109 is annotated in reference 82 as a hypothetical protein. For reference purposes, the amino acid sequence of full length IC109 is SEQ ID NO: 143 herein. In the R6 genome IC109 is spr0309 [205]. The use of IC109 for immunisation is reported in reference 82 (SEQ ID NO: 265 therein).

[0700] Preferred IC109 polypeptides for use with the invention comprise an amino acid sequence: (a) having 50% or more identity (e.g. 60%, 65%, 70%, 75%, 80%, 85%, 90%, 91%, 92%, 93%, 94%, 95%, 96%, 97%, 98%, 99%, 99.5% or more) to SEQ ID NO: 143; and/or (b) comprising a fragment of at least ‘n’ consecutive amino acids of SEQ ID NO: 143, wherein ‘n’ is 7 or more (e.g. 8, 10, 12, 14, 16, 18, 20, 25, 30, 35, 40, 50, 60, 70, 80, 90, 100, 150, 200, 250 or more). These IC109 proteins include variants of SEQ ID NO: 143. Preferred fragments of (b) comprise an epitope from SEQ ID NO: 143. Other preferred fragments lack one or more amino acids (e.g. 1, 2, 3, 4, 5, 6, 7, 8, 9, 10, 15, 20, 25 or more) from the C-terminus and/or one or more amino acids (e.g. 1, 2, 3, 4, 5, 6, 7, 8, 9, 10, 15, 20, 25 or more) from the N-terminus of SEQ ID NO: 143 while retaining at least one epitope of SEQ ID NO: 143. Other fragments omit one or more protein domains. Immunogenic fragments of IC 109 are identified in table 1 of reference 82.

[0701] IC110

[0702] IC110 is annotated in reference 82 as a hypothetical protein. For reference purposes, the amino acid sequence of full length IC110 is SEQ ID NO: 144 herein. In the R6 genome IC110 is spr1070 [205]. The use of IC110 for immunisation is reported in reference 82 (SEQ ID NO: 266 therein).

[0703] Preferred IC110 polypeptides for use with the invention comprise an amino acid sequence: (a) having 50% or more identity (e.g. 60%, 65%, 70%, 75%, 80%, 85%, 90%, 91%, 92%, 93%, 94%, 95%, 96%, 97%, 98%, 99%, 99.5% or more) to SEQ ID NO: 144; and/or (b) comprising a fragment of at least ‘n’ consecutive amino acids of SEQ ID NO: 144, wherein ‘n’ is 7 or more (e.g. 8, 10, 12, 14, 16, 18, 20, 25, 30, 35, 40, 50, 60, 70, 80, 90, 100, 150, 200, 250 or more). These IC110 proteins include variants of SEQ ID NO: 144. Preferred fragments of (b) comprise an epitope from SEQ ID NO: 144. Other preferred fragments lack one or more amino acids (e.g. 1, 2, 3, 4, 5, 6, 7, 8, 9, 10, 15, 20, 25 or more) from the C-terminus and/or one or more amino acids (e.g. 1, 2, 3, 4, 5, 6, 7, 8, 9, 10, 15, 20, 25 or more) from the N-terminus of SEQ ID NO: 144 while retaining at least one epitope of SEQ ID NO: 144. Other fragments omit one or more protein domains. Immunogenic fragments of IC 110 are identified in table 1 of reference 82.

[0704] IC111

[0705] IC111 is annotated in reference 82 as a hypothetical protein. For reference purposes, the amino acid sequence of full length IC111 is SEQ ID NO: 145 herein. In the R6 genome IC111 is spr0258 [205]. The use of IC111 for immunisation is reported in reference 82 (SEQ ID NO: 267 therein).

[0706] Preferred IC111 polypeptides for use with the invention comprise an amino acid sequence: (a) having 50% or more identity (e.g. 60%, 65%, 70%, 75%, 80%, 85%, 90%, 91%, 92%, 93%, 94%, 95%, 96%, 97%, 98%, 99%, 99.5% or more) to SEQ ID NO: 145; and/or (b) comprising a fragment of at least ‘n’ consecutive amino acids of SEQ ID NO: 145, wherein ‘n’ is 7 or more (e.g. 8, 10, 12, 14, 16, 18, 20, 25, 30, 35, 40, 50, 60, 70, 80, 90, 100, 150, 200, 250 or more). These IC111 proteins include variants of SEQ ID NO: 145. Preferred fragments of (b) comprise an epitope from SEQ ID NO: 145. Other preferred fragments lack one or more amino acids (e.g. 1, 2, 3, 4, 5, 6, 7, 8, 9, 10, 15, 20, 25 or more) from the C-terminus and/or one or more amino acids (e.g. 1, 2, 3, 4, 5, 6, 7, 8, 9, 10, 15, 20, 25 or more) from the N-terminus of SEQ ID NO: 145 while retaining at least one epitope of SEQ ID NO: 145. Other fragments omit one or more protein domains. Immunogenic fragments of IC 111 are identified in table 1 of reference 82.

[0707] IC112

[0708] IC112 is annotated in reference 82 as a hypothetical protein. For reference purposes, the amino acid sequence of full length IC112 is SEQ ID NO: 146 herein. In the R6 genome IC112 is spr0254 [205]. The use of IC112 for immunisation is reported in reference 82 (SEQ ID NO: 268 therein).

[0709] Preferred IC112 polypeptides for use with the invention comprise an amino acid sequence: (a) having 50% or more identity (e.g. 60%, 65%, 70%, 75%, 80%, 85%, 90%, 91%, 92%, 93%, 94%, 95%, 96%, 97%, 98%, 99%, 99.5% or more) to SEQ ID NO: 146; and/or (b) comprising a fragment of at least ‘n’ consecutive amino acids of SEQ ID NO: 146, wherein ‘n’ is 7 or more (e.g. 8, 10, 12, 14, 16, 18, 20, 25, 30, 35, 40, 50, 60, 70, 80, 90, 100, 150, 200, 250 or more). These IC112 proteins include variants of SEQ ID NO: 146. Preferred fragments of (b) comprise an epitope from SEQ ID NO: 146. Other preferred fragments lack one or more amino acids (e.g. 1, 2, 3, 4, 5, 6, 7, 8, 9, 10, 15, 20, 25 or more) from the C-terminus and/or one or more amino acids (e.g. 1, 2, 3, 4, 5, 6, 7, 8, 9, 10, 15, 20, 25 or more) from the N-terminus of SEQ ID NO: 146 while retaining at least one epitope of SEQ ID NO: 146. Other fragments omit one or more protein domains. Immunogenic fragments of IC112 are identified in table 1 of reference 82.

[0710] IC113

[0711] IC113 is annotated in reference 82 as a hypothetical protein. For reference purposes, the amino acid sequence of full length IC113 is SEQ ID NO: 147 herein. In the R6 genome IC113 is spr0171 [205]. The use of IC113 for immunisation is reported in reference 82 (SEQ ID NO: 269 therein).

[0712] Preferred IC113 polypeptides for use with the invention comprise an amino acid sequence: (a) having 50% or more identity (e.g. 60%, 65%, 70%, 75%, 80%, 85%, 90%, 91%, 92%, 93%, 94%, 95%, 96%, 97%, 98%, 99%, 99.5% or more) to SEQ ID NO: 147; and/or (b) comprising a fragment of at least ‘n’ consecutive amino acids of SEQ ID NO: 147, wherein ‘n’ is 7 or more (e.g. 8, 10, 12, 14, 16, 18, 20, 25, 30, 35, 40, 50, 60, 70, 80, 90, 100, 150, 200, 250 or more). These IC113 proteins include variants of SEQ ID NO: 147. Preferred fragments of (b) comprise an epitope from SEQ ID NO: 147. Other preferred fragments lack one or more amino acids (e.g. 1, 2, 3, 4, 5, 6, 7, 8, 9, 10, 15, 20, 25 or more) from the C-terminus and/or one or more amino acids (e.g. 1, 2, 3, 4, 5, 6, 7, 8, 9, 10, 15, 20, 25 or more) from the N-terminus of SEQ ID NO: 147 while retaining at least one epitope of SEQ ID NO: 147. Other fragments omit one or more protein domains. Immunogenic fragments of IC 113 are identified in table 1 of reference 82.

[0713] IC114

[0714] IC114 is annotated in reference 82 as a hypothetical protein. For reference purposes, the amino acid sequence of full length IC114 is SEQ ID NO: 148 herein. The use of IC114 for immunisation is reported in reference 82 (SEQ ID NO: 270 therein).

[0715] Preferred IC114 polypeptides for use with the invention comprise an amino acid sequence: (a) having 50% or more identity (e.g. 60%, 65%, 70%, 75%, 80%, 85%, 90%, 91%, 92%, 93%, 94%, 95%, 96%, 97%, 98%, 99%, 99.5% or more) to SEQ ID NO: 148; and/or (b) comprising a fragment of at least ‘n’ consecutive amino acids of SEQ ID NO: 148, wherein ‘n’ is 7 or more (e.g. 8, 10, 12, 14, 16, 18, 20, 25, 30, 35, 40, 50, 60, 70, 80, 90, 100, 150, 200, 250 or more). These IC114 proteins include variants of SEQ ID NO: 148. Preferred fragments of (b) comprise an epitope from SEQ ID NO: 148. Other preferred fragments lack one or more amino acids (e.g. 1, 2, 3, 4, 5, 6, 7, 8, 9, 10, 15, 20, 25 or more) from the C-terminus and/or one or more amino acids (e.g. 1, 2, 3, 4, 5, 6, 7, 8, 9, 10, 15, 20, 25 or more) from the N-terminus of SEQ ID NO: 148 while retaining at least one epitope of SEQ ID NO: 148. Other fragments omit one or more protein domains. Immunogenic fragments of IC 114 are identified in table 1 of reference 82.

[0716] IC115

[0717] IC115 is annotated in reference 82 as a hypothetical protein. For reference purposes, the amino acid sequence of full length IC115 is SEQ ID NO: 149 herein. In the R6 genome IC115 is spr0464 [205]. The use of IC115 for immunisation is reported in reference 82 (SEQ ID NO: 271 therein).

[0718] Preferred IC115 polypeptides for use with the invention comprise an amino acid sequence: (a) having 50% or more identity (e.g. 60%, 65%, 70%, 75%, 80%, 85%, 90%, 91%, 92%, 93%, 94%, 95%, 96%, 97%, 98%, 99%, 99.5% or more) to SEQ ID NO: 149; and/or (b) comprising a fragment of at least ‘n’ consecutive amino acids of SEQ ID NO: 149, wherein ‘n’ is 7 or more (e.g. 8, 10, 12, 14, 16, 18, 20, 25, 30, 35, 40, 50, 60, 70, 80, 90, 100, 150, 200, 250 or more). These IC115 proteins include variants of SEQ ID NO: 149. Preferred fragments of (b) comprise an epitope from SEQ ID NO: 149. Other preferred fragments lack one or more amino acids (e.g. 1, 2, 3, 4, 5, 6, 7, 8, 9, 10, 15, 20, 25 or more) from the C-terminus and/or one or more amino acids (e.g. 1, 2, 3, 4, 5, 6, 7, 8, 9, 10, 15, 20, 25 or more) from the N-terminus of SEQ ID NO: 149 while retaining at least one epitope of SEQ ID NO: 149. Other fragments omit one or more protein domains. Immunogenic fragments of IC 115 are identified in table 1 of reference 82.

[0719] IC116

[0720] IC116 is annotated in reference 82 as a hypothetical protein. For reference purposes, the amino acid sequence of full length IC116 is SEQ ID NO: 150 herein. In the R6 genome IC116 is spr0026 [205]. The use of IC116 for immunisation is reported in reference 82 (SEQ ID NO: 272 therein).

[0721] Preferred IC116 polypeptides for use with the invention comprise an amino acid sequence: (a) having 50% or more identity (e.g. 60%, 65%, 70%, 75%, 80%, 85%, 90%, 91%, 92%, 93%, 94%, 95%, 96%, 97%, 98%, 99%, 99.5% or more) to SEQ ID NO: 150; and/or (b) comprising a fragment of at least ‘n’ consecutive amino acids of SEQ ID NO: 150, wherein ‘n’ is 7 or more (e.g. 8, 10, 12, 14, 16, 18, 20, 25, 30, 35, 40, 50, 60, 70, 80, 90, 100, 150, 200, 250 or more). These IC116 proteins include variants of SEQ ID NO: 150. Preferred fragments of (b) comprise an epitope from SEQ ID NO: 150. Other preferred fragments lack one or more amino acids (e.g. 1, 2, 3, 4, 5, 6, 7, 8, 9, 10, 15, 20, 25 or more) from the C-terminus and/or one or more amino acids (e.g. 1, 2, 3, 4, 5, 6, 7, 8, 9, 10, 15, 20, 25 or more) from the N-terminus of SEQ ID NO: 150 while retaining at least one epitope of SEQ ID NO: 150. Other fragments omit one or more protein domains. Immunogenic fragments of IC 116 are identified in table 1 of reference 82.

[0722] IC117

[0723] IC117 is annotated in reference 82 as a hypothetical protein. For reference purposes, the amino acid sequence of full length IC117 is SEQ ID NO: 151 herein. In the R6 genome IC117 is spr1652 [205]. The use of IC117 for immunisation is reported in reference 82 (SEQ ID NO: 273 therein).

[0724] Preferred IC117 polypeptides for use with the invention comprise an amino acid sequence: (a) having 50% or more identity (e.g. 60%, 65%, 70%, 75%, 80%, 85%, 90%, 91%, 92%, 93%, 94%, 95%, 96%, 97%, 98%, 99%, 99.5% or more) to SEQ ID NO: 151; and/or (b) comprising a fragment of at least ‘n’ consecutive amino acids of SEQ ID NO: 151, wherein ‘n’ is 7 or more (e.g. 8, 10, 12, 14, 16, 18, 20, 25, 30, 35, 40, 50, 60, 70, 80, 90, 100, 150, 200, 250 or more). These IC117 proteins include variants of SEQ ID NO: 151. Preferred fragments of (b) comprise an epitope from SEQ ID NO: 151. Other preferred fragments lack one or more amino acids (e.g. 1, 2, 3, 4, 5, 6, 7, 8, 9, 10, 15, 20, 25 or more) from the C-terminus and/or one or more amino acids (e.g. 1, 2, 3, 4, 5, 6, 7, 8, 9, 10, 15, 20, 25 or more) from the N-terminus of SEQ ID NO: 151 while retaining at least one epitope of SEQ ID NO: 151. Other fragments omit one or more protein domains. Immunogenic fragments of IC 117 are identified in table 1 of reference 82.

[0725] IC118

[0726] IC118 is annotated in reference 82 as a hypothetical protein. For reference purposes, the amino acid sequence of full length IC118 is SEQ ID NO: 152 herein. In the R6 genome IC118 is spr1783 [205]. The use of IC118 for immunisation is reported in reference 82 (SEQ ID NO: 274 therein).

[0727] Preferred IC118 polypeptides for use with the invention comprise an amino acid sequence: (a) having 50% or more identity (e.g. 60%, 65%, 70%, 75%, 80%, 85%, 90%, 91%, 92%, 93%, 94%, 95%, 96%, 97%, 98%, 99%, 99.5% or more) to SEQ ID NO: 152; and/or (b) comprising a fragment of at least ‘n’ consecutive amino acids of SEQ ID NO: 152, wherein ‘n’ is 7 or more (e.g. 8, 10, 12, 14, 16, 18, 20, 25, 30, 35, 40, 50, 60, 70, 80, 90, 100, 150, 200, 250 or more). These IC118 proteins include variants of SEQ ID NO: 152. Preferred fragments of (b) comprise an epitope from SEQ ID NO: 152. Other preferred fragments lack one or more amino acids (e.g. 1, 2, 3, 4, 5, 6, 7, 8, 9, 10, 15, 20, 25 or more) from the C-terminus and/or one or more amino acids (e.g. 1, 2, 3, 4, 5, 6, 7, 8, 9, 10, 15, 20, 25 or more) from the N-terminus of SEQ ID NO: 152 while retaining at least one epitope of SEQ ID NO: 152. Other fragments omit one or more protein domains. Immunogenic fragments of IC 118 are identified in table 1 of reference 82.

[0728] IC119

[0729] IC119 is annotated in reference 82 as a hypothetical protein. For reference purposes, the amino acid sequence of full length IC119 is SEQ ID NO: 153 herein. The use of IC119 for immunisation is reported in reference 82 (SEQ ID NO: 275 therein).

[0730] Preferred IC119 polypeptides for use with the invention comprise an amino acid sequence: (a) having 50% or more identity (e.g. 60%, 65%, 70%, 75%, 80%, 85%, 90%, 91%, 92%, 93%, 94%, 95%, 96%, 97%, 98%, 99%, 99.5% or more) to SEQ ID NO: 153; and/or (b) comprising a fragment of at least ‘n’ consecutive amino acids of SEQ ID NO: 153, wherein ‘n’ is 7 or more (e.g. 8, 10, 12, 14, 16, 18, 20, 25, 30, 35, 40, 50, 60, 70, 80, 90, 100, 150, 200, 250 or more). These IC119 proteins include variants of SEQ ID NO: 153. Preferred fragments of (b) comprise an epitope from SEQ ID NO: 153. Other preferred fragments lack one or more amino acids (e.g. 1, 2, 3, 4, 5, 6, 7, 8, 9, 10, 15, 20, 25 or more) from the C-terminus and/or one or more amino acids (e.g. 1, 2, 3, 4, 5, 6, 7, 8, 9, 10, 15, 20, 25 or more) from the N-terminus of SEQ ID NO: 153 while retaining at least one epitope of SEQ ID NO: 153. Other fragments omit one or more protein domains. Immunogenic fragments of IC 119 are identified in table 1 of reference 82.

[0731] IC120

[0732] IC120 is annotated in reference 82 as a hypothetical protein. For reference purposes, the amino acid sequence of full length IC120 is SEQ ID NO: 154 herein. In the R6 genome IC120 is spr1153 [205]. The use of IC120 for immunisation is reported in reference 82 (SEQ ID NO: 276 therein).

[0733] Preferred IC120 polypeptides for use with the invention comprise an amino acid sequence: (a) having 50% or more identity (e.g. 60%, 65%, 70%, 75%, 80%, 85%, 90%, 91%, 92%, 93%, 94%, 95%, 96%, 97%, 98%, 99%, 99.5% or more) to SEQ ID NO: 154; and/or (b) comprising a fragment of at least ‘n’ consecutive amino acids of SEQ ID NO: 154, wherein ‘n’ is 7 or more (e.g. 8, 10, 12, 14, 16, 18, 20, 25, 30, 35, 40, 50, 60, 70, 80, 90, 100, 150, 200, 250 or more). These IC120 proteins include variants of SEQ ID NO: 154. Preferred fragments of (b) comprise an epitope from SEQ ID NO: 154. Other preferred fragments lack one or more amino acids (e.g. 1, 2, 3, 4, 5, 6, 7, 8, 9, 10, 15, 20, 25 or more) from the C-terminus and/or one or more amino acids (e.g. 1, 2, 3, 4, 5, 6, 7, 8, 9, 10, 15, 20, 25 or more) from the N-terminus of SEQ ID NO: 154 while retaining at least one epitope of SEQ ID NO: 154. Other fragments omit one or more protein domains. Immunogenic fragments of IC 120 are identified in table 1 of reference 82.

[0734] IC121

[0735] IC121 is annotated in reference 82 as a hypothetical protein. For reference purposes, the amino acid sequence of full length IC121 is SEQ ID NO: 155 herein. In the R6 genome IC121 is spr1977 [205]. The use of IC121 for immunisation is reported in reference 82 (SEQ ID NO: 277 therein).

[0736] Preferred IC121 polypeptides for use with the invention comprise an amino acid sequence: (a) having 50% or more identity (e.g. 60%, 65%, 70%, 75%, 80%, 85%, 90%, 91%, 92%, 93%, 94%, 95%, 96%, 97%, 98%, 99%, 99.5% or more) to SEQ ID NO: 155; and/or (b) comprising a fragment of at least ‘n’ consecutive amino acids of SEQ ID NO: 155, wherein ‘n’ is 7 or more (e.g. 8, 10, 12, 14, 16, 18, 20, 25, 30, 35, 40, 50, 60, 70, 80, 90, 100, 150, 200, 250 or more). These IC121 proteins include variants of SEQ ID NO: 155. Preferred fragments of (b) comprise an epitope from SEQ ID NO: 155. Other preferred fragments lack one or more amino acids (e.g. 1, 2, 3, 4, 5, 6, 7, 8, 9, 10, 15, 20, 25 or more) from the C-terminus and/or one or more amino acids (e.g. 1, 2, 3, 4, 5, 6, 7, 8, 9, 10, 15, 20, 25 or more) from the N-terminus of SEQ ID NO: 155 while retaining at least one epitope of SEQ ID NO: 155. Other fragments omit one or more protein domains. Immunogenic fragments of IC 121 are identified in table 1 of reference 82.

[0737] IC122

[0738] IC122 is annotated in reference 82 as a hypothetical protein. For reference purposes, the amino acid sequence of full length IC122 is SEQ ID NO: 156 herein. The use of IC122 for immunisation is reported in reference 82 (SEQ ID NO: 278 therein).

[0739] Preferred IC122 polypeptides for use with the invention comprise an amino acid sequence: (a) having 50% or more identity (e.g. 60%, 65%, 70%, 75%, 80%, 85%, 90%, 91%, 92%, 93%, 94%, 95%, 96%, 97%, 98%, 99%, 99.5% or more) to SEQ ID NO: 156; and/or (b) comprising a fragment of at least ‘n’ consecutive amino acids of SEQ ID NO: 156, wherein ‘n’ is 7 or more (e.g. 8, 10, 12, 14, 16, 18, 20, 25, 30, 35, 40, 50, 60, 70, 80, 90, 100, 150, 200, 250 or more). These IC122 proteins include variants of SEQ ID NO: 156. Preferred fragments of (b) comprise an epitope from SEQ ID NO: 156. Other preferred fragments lack one or more amino acids (e.g. 1, 2, 3, 4, 5, 6, 7, 8, 9, 10, 15, 20, 25 or more) from the C-terminus and/or one or more amino acids (e.g. 1, 2, 3, 4, 5, 6, 7, 8, 9, 10, 15, 20, 25 or more) from the N-terminus of SEQ ID NO: 156 while retaining at least one epitope of SEQ ID NO: 156. Other fragments omit one or more protein domains. Immunogenic fragments of IC 122 are identified in table 1 of reference 82.

[0740] IC123

[0741] IC123 is annotated in reference 82 as a hypothetical protein. For reference purposes, the amino acid sequence of full length IC123 is SEQ ID NO: 157 herein. In the R6 genome IC123 is spr1049 [205]. The use of IC123 for immunisation is reported in reference 82 (SEQ ID NO: 279 therein).

[0742] Preferred IC123 polypeptides for use with the invention comprise an amino acid sequence: (a) having 50% or more identity (e.g. 60%, 65%, 70%, 75%, 80%, 85%, 90%, 91%, 92%, 93%, 94%, 95%, 96%, 97%, 98%, 99%, 99.5% or more) to SEQ ID NO: 157; and/or (b) comprising a fragment of at least ‘n’ consecutive amino acids of SEQ ID NO: 157, wherein ‘n’ is 7 or more (e.g. 8, 10, 12, 14, 16, 18, 20, 25, 30, 35, 40, 50, 60, 70, 80, 90, 100, 150, 200, 250 or more). These IC123 proteins include variants of SEQ ID NO: 157. Preferred fragments of (b) comprise an epitope from SEQ ID NO: 157. Other preferred fragments lack one or more amino acids (e.g. 1, 2, 3, 4, 5, 6, 7, 8, 9, 10, 15, 20, 25 or more) from the C-terminus and/or one or more amino acids (e.g. 1, 2, 3, 4, 5, 6, 7, 8, 9, 10, 15, 20, 25 or more) from the N-terminus of SEQ ID NO: 157 while retaining at least one epitope of SEQ ID NO: 157. Other fragments omit one or more protein domains. Immunogenic fragments of IC 123 are identified in table 1 of reference 82.

[0743] IC124

[0744] IC124 is annotated in reference 82 as a hypothetical protein. For reference purposes, the amino acid sequence of full length IC124 is SEQ ID NO: 158 herein. In the R6 genome IC124 is spr1811 [205]. The use of IC124 for immunisation is reported in reference 82 (SEQ ID NO: 280 therein).

[0745] Preferred IC124 polypeptides for use with the invention comprise an amino acid sequence: (a) having 50% or more identity (e.g. 60%, 65%, 70%, 75%, 80%, 85%, 90%, 91%, 92%, 93%, 94%, 95%, 96%, 97%, 98%, 99%, 99.5% or more) to SEQ ID NO: 158; and/or (b) comprising a fragment of at least ‘n’ consecutive amino acids of SEQ ID NO: 158, wherein ‘n’ is 7 or more (e.g. 8, 10, 12, 14, 16, 18, 20, 25, 30, 35, 40, 50, 60, 70, 80, 90, 100, 150, 200, 250 or more). These IC124 proteins include variants of SEQ ID NO: 158. Preferred fragments of (b) comprise an epitope from SEQ ID NO: 158. Other preferred fragments lack one or more amino acids (e.g. 1, 2, 3, 4, 5, 6, 7, 8, 9, 10, 15, 20, 25 or more) from the C-terminus and/or one or more amino acids (e.g. 1, 2, 3, 4, 5, 6, 7, 8, 9, 10, 15, 20, 25 or more) from the N-terminus of SEQ ID NO: 158 while retaining at least one epitope of SEQ ID NO: 158. Other fragments omit one or more protein domains. Immunogenic fragments of IC124 are identified in table 1 of reference 82.

[0746] IC125

[0747] IC125 is annotated in reference 82 as a hypothetical protein. For reference purposes, the amino acid sequence of full length IC125 is SEQ ID NO: 159 herein. In the R6 genome IC125 is spr0381 [205]. The use of IC125 for immunisation is reported in reference 82 (SEQ ID NO: 281 therein).

[0748] Preferred IC125 polypeptides for use with the invention comprise an amino acid sequence: (a) having 50% or more identity (e.g. 60%, 65%, 70%, 75%, 80%, 85%, 90%, 91%, 92%, 93%, 94%, 95%, 96%, 97%, 98%, 99%, 99.5% or more) to SEQ ID NO: 159; and/or (b) comprising a fragment of at least ‘n’ consecutive amino acids of SEQ ID NO: 159, wherein ‘n’ is 7 or more (e.g. 8, 10, 12, 14, 16, 18, 20, 25, 30, 35, 40, 50, 60, 70, 80, 90, 100, 150, 200, 250 or more). These IC125 proteins include variants of SEQ ID NO: 159. Preferred fragments of (b) comprise an epitope from SEQ ID NO: 159. Other preferred fragments lack one or more amino acids (e.g. 1, 2, 3, 4, 5, 6, 7, 8, 9, 10, 15, 20, 25 or more) from the C-terminus and/or one or more amino acids (e.g. 1, 2, 3, 4, 5, 6, 7, 8, 9, 10, 15, 20, 25 or more) from the N-terminus of SEQ ID NO: 159 while retaining at least one epitope of SEQ ID NO: 159. Other fragments omit one or more protein domains. Immunogenic fragments of IC 125 are identified in table 1 of reference 82.

[0749] IC126

[0750] IC126 is annotated in reference 82 as a hypothetical protein. For reference purposes, the amino acid sequence of full length IC126 is SEQ ID NO: 160 herein. The use of IC126 for immunisation is reported in reference 82 (SEQ ID NO: 282 therein).

[0751] Preferred IC126 polypeptides for use with the invention comprise an amino acid sequence: (a) having 50% or more identity (e.g. 60%, 65%, 70%, 75%, 80%, 85%, 90%, 91%, 92%, 93%, 94%, 95%, 96%, 97%, 98%, 99%, 99.5% or more) to SEQ ID NO: 160; and/or (b) comprising a fragment of at least ‘n’ consecutive amino acids of SEQ ID NO: 160, wherein ‘n’ is 7 or more (e.g. 8, 10, 12, 14, 16, 18, 20, 25, 30, 35, 40, 50, 60, 70, 80, 90, 100, 150, 200, 250 or more). These IC126 proteins include variants of SEQ ID NO: 160. Preferred fragments of (b) comprise an epitope from SEQ ID NO: 160. Other preferred fragments lack one or more amino acids (e.g. 1, 2, 3, 4, 5, 6, 7, 8, 9, 10, 15, 20, 25 or more) from the C-terminus and/or one or more amino acids (e.g. 1, 2, 3, 4, 5, 6, 7, 8, 9, 10, 15, 20, 25 or more) from the N-terminus of SEQ ID NO: 160 while retaining at least one epitope of SEQ ID NO: 160. Other fragments omit one or more protein domains. Immunogenic fragments of IC 126 are identified in table 1 of reference 82.

[0752] IC127

[0753] IC127 is annotated in reference 82 as a hypothetical protein. For reference purposes, the amino acid sequence of full length IC127 is SEQ ID NO: 161 herein. In the R6 genome IC127 is spr0061 [205]. The use of IC127 for immunisation is reported in reference 82 (SEQ ID NO: 283 therein).

[0754] Preferred IC127 polypeptides for use with the invention comprise an amino acid sequence: (a) having 50% or more identity (e.g. 60%, 65%, 70%, 75%, 80%, 85%, 90%, 91%, 92%, 93%, 94%, 95%, 96%, 97%, 98%, 99%, 99.5% or more) to SEQ ID NO: 161; and/or (b) comprising a fragment of at least ‘n’ consecutive amino acids of SEQ ID NO: 161, wherein ‘n’ is 7 or more (e.g. 8, 10, 12, 14, 16, 18, 20, 25, 30, 35, 40, 50, 60, 70, 80, 90, 100, 150, 200, 250 or more). These IC127 proteins include variants of SEQ ID NO: 161. Preferred fragments of (b) comprise an epitope from SEQ ID NO: 161. Other preferred fragments lack one or more amino acids (e.g. 1, 2, 3, 4, 5, 6, 7, 8, 9, 10, 15, 20, 25 or more) from the C-terminus and/or one or more amino acids (e.g. 1, 2, 3, 4, 5, 6, 7, 8, 9, 10, 15, 20, 25 or more) from the N-terminus of SEQ ID NO: 161 while retaining at least one epitope of SEQ ID NO: 161. Other fragments omit one or more protein domains. Immunogenic fragments of IC 127 are identified in table 1 of reference 82.

[0755] IC128

[0756] IC128 is annotated in reference 82 as a hypothetical protein. For reference purposes, the amino acid sequence of full length IC128 is SEQ ID NO: 162 herein. In the R6 genome IC128 is spr0641 [205]. The use of IC128 for immunisation is reported in reference 82 (SEQ ID NO: 284 therein).

[0757] Preferred IC128 polypeptides for use with the invention comprise an amino acid sequence: (a) having 50% or more identity (e.g. 60%, 65%, 70%, 75%, 80%, 85%, 90%, 91%, 92%, 93%, 94%, 95%, 96%, 97%, 98%, 99%, 99.5% or more) to SEQ ID NO: 162; and/or (b) comprising a fragment of at least ‘n’ consecutive amino acids of SEQ ID NO: 162, wherein ‘n’ is 7 or more (e.g. 8, 10, 12, 14, 16, 18, 20, 25, 30, 35, 40, 50, 60, 70, 80, 90, 100, 150, 200, 250 or more). These IC128 proteins include variants of SEQ ID NO: 162. Preferred fragments of (b) comprise an epitope from SEQ ID NO: 162. Other preferred fragments lack one or more amino acids (e.g. 1, 2, 3, 4, 5, 6, 7, 8, 9, 10, 15, 20, 25 or more) from the C-terminus and/or one or more amino acids (e.g. 1, 2, 3, 4, 5, 6, 7, 8, 9, 10, 15, 20, 25 or more) from the N-terminus of SEQ ID NO: 162 while retaining at least one epitope of SEQ ID NO: 162. Other fragments omit one or more protein domains. Immunogenic fragments of IC 128 are identified in table 1 of reference 82.

[0758] IC129

[0759] IC129 is annotated in reference 82 as a hypothetical protein. For reference purposes, the amino acid sequence of full length IC129 is SEQ ID NO: 163 herein. In the R6 genome IC129 is spr1205 [205]. The use of IC129 for immunisation is reported in reference 82 (SEQ ID NO: 285 therein).

[0760] Preferred IC129 polypeptides for use with the invention comprise an amino acid sequence: (a) having 50% or more identity (e.g. 60%, 65%, 70%, 75%, 80%, 85%, 90%, 91%, 92%, 93%, 94%, 95%, 96%, 97%, 98%, 99%, 99.5% or more) to SEQ ID NO: 163; and/or (b) comprising a fragment of at least ‘n’ consecutive amino acids of SEQ ID NO: 163, wherein ‘n’ is 7 or more (e.g. 8, 10, 12, 14, 16, 18, 20, 25, 30, 35, 40, 50, 60, 70, 80, 90, 100, 150, 200, 250 or more). These IC129 proteins include variants of SEQ ID NO: 163. Preferred fragments of (b) comprise an epitope from SEQ ID NO: 163. Other preferred fragments lack one or more amino acids (e.g. 1, 2, 3, 4, 5, 6, 7, 8, 9, 10, 15, 20, 25 or more) from the C-terminus and/or one or more amino acids (e.g. 1, 2, 3, 4, 5, 6, 7, 8, 9, 10, 15, 20, 25 or more) from the N-terminus of SEQ ID NO: 163 while retaining at least one epitope of SEQ ID NO: 163. Other fragments omit one or more protein domains. Immunogenic fragments of IC 129 are identified in table 1 of reference 82.

[0761] IC130

[0762] IC130 is annotated in reference 82 as a hypothetical protein. For reference purposes, the amino acid sequence of full length IC130 is SEQ ID NO: 164 herein. In the R6 genome IC130 is spr1841 [205]. The use of IC130 for immunisation is reported in reference 82 (SEQ ID NO: 286 therein).

[0763] Preferred IC130 polypeptides for use with the invention comprise an amino acid sequence: (a) having 50% or more identity (e.g. 60%, 65%, 70%, 75%, 80%, 85%, 90%, 91%, 92%, 93%, 94%, 95%, 96%, 97%, 98%, 99%, 99.5% or more) to SEQ ID NO: 164; and/or (b) comprising a fragment of at least ‘n’ consecutive amino acids of SEQ ID NO: 164, wherein ‘n’ is 7 or more (e.g. 8, 10, 12, 14, 16, 18, 20, 25, 30, 35, 40, 50, 60, 70, 80, 90, 100, 150, 200, 250 or more). These IC130 proteins include variants of SEQ ID NO: 164. Preferred fragments of (b) comprise an epitope from SEQ ID NO: 164. Other preferred fragments lack one or more amino acids (e.g. 1, 2, 3, 4, 5, 6, 7, 8, 9, 10, 15, 20, 25 or more) from the C-terminus and/or one or more amino acids (e.g. 1, 2, 3, 4, 5, 6, 7, 8, 9, 10, 15, 20, 25 or more) from the N-terminus of SEQ ID NO: 164 while retaining at least one epitope of SEQ ID NO: 164. Other fragments omit one or more protein domains. Immunogenic fragments of IC130 are identified in table 1 of reference 82.

[0764] IC131

[0765] IC131 is annotated in reference 82 as a hypothetical protein. For reference purposes, the amino acid sequence of full length IC131 is SEQ ID NO: 165 herein. In the R6 genome IC131 is spr1777 [205]. The use of IC131 for immunisation is reported in reference 82 (SEQ ID NO: 287 therein).

[0766] Preferred IC131 polypeptides for use with the invention comprise an amino acid sequence: (a) having 50% or more identity (e.g. 60%, 65%, 70%, 75%, 80%, 85%, 90%, 91%, 92%, 93%, 94%, 95%, 96%, 97%, 98%, 99%, 99.5% or more) to SEQ ID NO: 165; and/or (b) comprising a fragment of at least ‘n’ consecutive amino acids of SEQ ID NO: 165, wherein ‘n’ is 7 or more (e.g. 8, 10, 12, 14, 16, 18, 20, 25, 30, 35, 40, 50, 60, 70, 80, 90, 100, 150, 200, 250 or more). These IC131 proteins include variants of SEQ ID NO: 165. Preferred fragments of (b) comprise an epitope from SEQ ID NO: 165. Other preferred fragments lack one or more amino acids (e.g. 1, 2, 3, 4, 5, 6, 7, 8, 9, 10, 15, 20, 25 or more) from the C-terminus and/or one or more amino acids (e.g. 1, 2, 3, 4, 5, 6, 7, 8, 9, 10, 15, 20, 25 or more) from the N-terminus of SEQ ID NO: 165 while retaining at least one epitope of SEQ ID NO: 165. Other fragments omit one or more protein domains. Immunogenic fragments of IC 131 are identified in table 1 of reference 82.

[0767] spr0222

[0768] The original ‘spr0222’ sequence was annotated in references 115, 116, 117, 118, 119 and 120 as ‘ABC transporter ATP-binding protein - iron transport’ (see GI:15457768). For reference purposes, the amino acid sequence of full length spr0222 as found in the R6 strain is given as SEQ ID NO: 121 herein. Its use in immunisation is suggested in reference 78.

[0769] Preferred spr0222 polypeptides for use with the invention comprise an amino acid sequence: (a) having 50% or more identity (e.g. 60%, 65%, 70%, 75%, 80%, 85%, 90%, 91%, 92%, 93%, 94%, 95%, 96%, 97%, 98%, 99%, 99.5% or more) to SEQ ID NO: 121; and/or (b) comprising a fragment of at least ‘n’ consecutive amino acids of SEQ ID NO: 121, wherein ‘n’ is 7 or more (e.g. 8, 10, 12, 14, 16, 18, 20, 25, 30, 35, 40, 50, 60, 70, 80, 90, 100, 150, 200, 250 or more). These spr022 proteins include variants of SEQ ID NO: 121. Preferred fragments of (b) comprise an epitope from SEQ ID NO: 121. Other preferred fragments lack one or more amino acids (e.g. 1, 2, 3, 4, 5, 6, 7, 8, 9, 10, 15, 20, 25 or more) from the C-terminus and/or one or more amino acids (e.g. 1, 2, 3, 4, 5, 6, 7, 8, 9, 10, 15, 20, 25 or more) from the N-terminus of SEQ ID NO: 121 while retaining at least one epitope of SEQ ID NO: 121. Other fragments omit one or more protein domains.

[0770] CibO

[0771] CbiO is annotated as a cobalt transporter ATP-binding subunit. For reference purposes, the amino acid sequence of full length CbiO is SEQ ID NO: 167 herein. In the R6 genome CbiO is spr2025 [205]. The use of CbiO for immunisation is reported in reference 79 (‘ID2’ therein).

[0772] Preferred CbiO polypeptides for use with the invention comprise an amino acid sequence: (a) having 50% or more identity (e.g. 60%, 65%, 70%, 75%, 80%, 85%, 90%, 91%, 92%, 93%, 94%, 95%, 96%, 97%, 98%, 99%, 99.5% or more) to SEQ ID NO: 167; and/or (b) comprising a fragment of at least ‘n’ consecutive amino acids of SEQ ID NO: 167, wherein ‘n’ is 7 or more (e.g. 8, 10, 12, 14, 16, 18, 20, 25, 30, 35, 40, 50, 60, 70, 80, 90, 100, 150, 200, 250 or more). These CbiO proteins include variants of SEQ ID NO: 167. Preferred fragments of (b) comprise an epitope from SEQ ID NO: 167. Other preferred fragments lack one or more amino acids (e.g. 1, 2, 3, 4, 5, 6, 7, 8, 9, 10, 15, 20, 25 or more) from the C-terminus and/or one or more amino acids (e.g. 1, 2, 3, 4, 5, 6, 7, 8, 9, 10, 15, 20, 25 or more) from the N-terminus of SEQ ID NO: 167 while retaining at least one epitope of SEQ ID NO: 167. Other fragments omit one or more protein domains.

[0773] 30S ribosomal protein S8

[0774] For reference purposes, the amino acid sequence of 30S ribosomal protein S8 is SEQ ID NO: 168 herein. In the R6 genome the S8 subunit is spr0203 [205].

[0775] Preferred S8 polypeptides for use with the invention comprise an amino acid sequence: (a) having 50% or more identity (e.g. 60%, 65%, 70%, 75%, 80%, 85%, 90%, 91%, 92%, 93%, 94%, 95%, 96%, 97%, 98%, 99%, 99.5% or more) to SEQ ID NO: 168; and/or (b) comprising a fragment of at least ‘n’ consecutive amino acids of SEQ ID NO: 168, wherein ‘n’ is 7 or more (e.g. 8, 10, 12, 14, 16, 18, 20, 25, 30, 35, 40, 50, 60, 70, 80, 90, 100, 150, 200, 250 or more). These S8 proteins include variants of SEQ ID NO: 168. Preferred fragments of (b) comprise an epitope from SEQ ID NO: 168. Other preferred fragments lack one or more amino acids (e.g. 1, 2, 3, 4, 5, 6, 7, 8, 9, 10, 15, 20, 25 or more) from the C-terminus and/or one or more amino acids (e.g. 1, 2, 3, 4, 5, 6, 7, 8, 9, 10, 15, 20, 25 or more) from the N-terminus of SEQ ID NO: 168 while retaining at least one epitope of SEQ ID NO: 168. Other fragments omit one or more protein domains.

[0776] Combinations

[0777] A composition useful for immunisation preferably comprises an RrgB epitope identified herein. In a typical embodiment, a composition useful for immunisation comprises epitopes from at least two RrgB clades, typically three RrgB clades, either as a hybrid polypeptide or as separate polypeptides. In addition, a composition may include: (i) one or more further polypeptides that elicit antibody responses against pneumococcal proteins, particularly against pneumococcal proteins other than RrgB; (ii) a capsular saccharide from pneumococcus; and/or (iii) one or more further immunogens that elicit antibody responses that recognise epitopes on non-pneumococcal organisms.

[0778] RrgB epitopes from one or more clades may be combined with one or more (i. e. 1, 2, 3, 4, 5, 6, 7, 8, 9, 10, 11, 12, or all 13) protein antigens, preferably selected from the group consisting of: (1) a spr0057 antigen; (2) a spr0565 antigen; (3) a spr1098 antigen; (4) a spr1416 antigen; (5) a spr1418 antigen; (6) a spr0867 antigen; (7) a spr1431 antigen; (8) a spr1739 antigen; (9) a spr2021 antigen; (10) a spr0096 antigen; (11) a spr1707 antigen; (12) a spr1875 antigen; and/or (13) a spr0884 antigen.

[0779] Similarly, RrgB epitopes from one or more clades may be combined with one or more (i.e. 1, 2, 3, 4, 5, 6, 7, 8, 9, 10, 11, 12, 13, 14, 15, 16, 17, 18, 19, or all 20) protein antigens selected from the group consisting of: (1) ClpP; (2) LytA; (3) PhtA; (4) PhtB; (5) PhtD; (6) PhtE; (7) ZmpB; (8) CbpD; (9) CbpG; (10) PvaA; (11) CPL1; (12) PspC; (13) PspA; (14) PsaA; (15) PrtA; (16) Sp133; (17) PiaA; (18) PiuA; (19) CbiO; and/or (20) 30S ribosomal protein S8.

[0780] These further antigens may be added as separate polypeptides. As an alternative, they may be added as hybrids e.g. a spr0057-spr0096 hybrid or a spr0096-spr2021 hybrid, a spr0565-PhtD hybrid, etc. As a further alternative, they may be fused to a RrgB epitope sequence to provide a hybrid polypeptide e.g. a RrgB-spr0057 hybrid.

[0781] For example, a chimeric RrgB polypeptide including epitopes from two or three RrgB clades may be combined with: (a) a mixture of spr0057, spr0096 and spr2021; (b) a mixture of spr0057, spr0565 and spr2021; (c) a mixture of spr0057, spr0096 and spr0565; (d) a mixture of spr0057, spr0096, spr0565 and spr2021; (e) a mixture of spr1418, spr0884 and spr0096; (f) a mixture of spr1418, spr0884 and spr2021; (g) a mixture of spr1418, spr0884, spr0096 and spr2021; (h) a mixture of spr0884, spr1416 and spr0057; (h) a mixture of spr0884, spr1416 and spr0096; (h) a mixture of spr0884, spr1416, spr0057 and spr0096; or (i) a mixture of spr1418, spr1431 and spr0565. Where these mixtures include both spr0057 and spr0096, a hybrid protein can be used e.g. comprising SEQ ID NO: 82 (see SEQ ID NO: 200 of ref. 121) or comprising SEQ ID NO: 83. Where these mixtures include both spr0096 and spr2021, a hybrid protein can be used e.g. comprising SEQ ID NO: 84 (see SEQ ID NO: 205 of ref. 121).

[0782] In a further example, a chimeric RrgB polypeptide including epitopes from two or three RrgB clades may be combined with a pneumococcal immunogen comprising an spr2021 (also referred to as SP2216) antigen, an SP1732 antigen and optionally a PsaA antigen. A suitable pneumococcal immunogen of this sort is the immunogen disclosed in reference 91 that comprises the antigens “SP2216-1” (SEQ ID NO: 1 in reference 91; SEQ ID NO: 97 herein), “SP 1732-3” (SEQ ID NO: 2 in reference 91; SEQ ID NO: 98 herein) and, optionally, PsaA (SEQ ID NO: 3 in reference 91; SEQ ID NO: 99 herein). Polypeptides comprising immunogenic fragments of these SEQ ID NOs can be used in place of the actual disclosed SEQ ID NOs e.g. comprising at least one immunogenic fragment from each of SEQ ID NOs 97 & 98. Polypeptides comprising variants of spr2021 (SP2216), SP1732 and optionally PsaA can also be used in place of the actual disclosed SEQ ID NOs e.g. comprising at least one variant from each of SEQ ID NOs 97 and 98. Examples of this combination include the combination of a pneumococcal immunogen as disclosed in reference 91 with a chimeric RrgB polypeptide comprising chimera II-I-III (e.g. SEQ ID NO: 21) or chimera III-II-I (e.g. SEQ ID NO:15) as detailed below. The further antigens may be added as separate polypeptides. As an alternative, they may be added as hybrids e.g. a spr2021-SP1732 hybrid or a spr2021-SP1732-PsaA hybrid. As a further alternative, they may be fused to a RrgB polypeptide sequence, e.g. a chimeric RrgB polypeptide, to provide a hybrid polypeptide e.g. a RrgB-spr2021-SP1732 hybrid. As detailed above, compositions of the invention comprising combinations such as these can optionally comprise one or more adjuvants.

[0783] Hybrid Polypeptides

[0784] Pneumococcal antigens used in the invention may be present in the composition as individual separate polypeptides. Where more than one antigen is used, however, they do not have to be present as separate polypeptides. Instead, at least two (e.g. 2, 3, 4, 5, or more) antigens can be expressed as a single polypeptide chain (a ‘hybrid’ polypeptide). Hybrid polypeptides offer two main advantages: first, a polypeptide that may be unstable or poorly expressed on its own can be assisted by adding a suitable hybrid partner that overcomes the problem; second, commercial manufacture is simplified as only one expression and purification need be employed in order to produce two polypeptides which are both antigenically useful. Hybrids consisting of amino acid sequences from two, three, four, five, six, seven, eight, nine, or ten pneumococcal antigens are useful. In particular, hybrids consisting of amino acid sequences from two, three, four, or five pneumococcal antigens are preferred, such as two or three pneumococcal antigens.

[0785] Different RrgB Glade epitopes used in the invention do not have to be present as separate polypeptides but can instead be expressed as a single polypeptide chain (a ‘hybrid’ polypeptide or ‘chimera’). Hybrid polypeptides offer two main advantages: first, a polypeptide that may be unstable or poorly expressed on its own can be assisted by adding a suitable hybrid partner that overcomes the problem; second, commercial manufacture is simplified as only one expression and purification need to be employed in order to produce two polypeptides which are both antigenically useful.

[0786] Hybrid polypeptides can include sequences from only RrgB antigens but in other embodiments can include non-RrgB antigens (usually pneumococcal non-RrgB antigens), such as other pilus subunits. If non-RrgB antigens are present these may be to the N-terminus of any two RrgB sequences, to the C-terminus of any two RrgB sequences, or may be between two RrgB sequences.

[0787] The hybrid polypeptide may comprise two or more polypeptide sequences from the first antigen group. The hybrid polypeptide may comprise one or more polypeptide sequences from the first antigen group and one or more polypeptide sequences from the second antigen group. The hybrid polypeptide may comprise one or more polypeptide sequences from the first antigen group and one or more polypeptide sequences from the third antigen group. The hybrid polypeptide may comprise one or more polypeptide sequences from the second antigen group and one or more polypeptide sequences from the third antigen group. The hybrid polypeptide may comprise two or more polypeptide sequences from the seventh antigen group. The hybrid polypeptide may comprise two or more polypeptide sequences from the eighth antigen group. The hybrid polypeptide may comprise two or more polypeptide sequences from the ninth antigen group. The hybrid polypeptide may comprise two or more polypeptide sequences from the tenth antigen group. Moreover, the hybrid polypeptide may comprise two or more polypeptide sequences from each of the antigens listed above, or two or more variants of the same antigen in the cases in which the sequence has partial variability across strains.

[0788] In one embodiment, a hybrid polypeptide according to the invention consists of 50 or fewer, 45 or fewer, 40 or fewer, 35 or fewer, 34, 33 or fewer amino acid residues. Different hybrid polypeptides may be mixed together in a single formulation. Hybrids may be combined with non-hybrid RrgB antigens or other non-RrgB antigens. Hybrids may be combined with non-hybrid antigens selected from the first, second or third antigen groups. Within such combinations, a pneumococcal antigen may be present in more than one hybrid polypeptide and/or as a non-hybrid polypeptide. It is preferred, however, that an antigen is present either as a hybrid or as a non-hybrid, but not as both.

[0789] The hybrid polypeptides can also be combined with conjugates or non-pneumococcal antigens as described above.

[0790] Hybrid polypeptides may be represented by the formula NH₂-A-{-X-L-}ₙ-B—COOH. Hybrid polypeptides can be represented by the formula NH₂-A-{-X-L-}ₙ-B—COOH, wherein: X is an amino acid sequence of a pneumococcal antigen, as described above; L is an optional linker amino acid sequence; A is an optional N-terminal amino acid sequence; B is an optional C-terminal amino acid sequence; n is an integer of 2 or more (e.g. 2, 3, 4, 5, 6, etc.). Usually n is 2 or 3.

[0791] If a —X— moiety has a leader peptide sequence in its wild-type form, this may be included or omitted in the hybrid protein. In some embodiments, the leader peptides will be deleted except for that of the —X— moiety located at the N-terminus of the hybrid protein i.e. the leader peptide of X₁ will be retained, but the leader peptides of X₂ . . . X. will be omitted. This is equivalent to deleting all leader peptides and using the leader peptide of X₁ as moiety -A-.

[0792] For each n instances of {—X-L-}, linker amino acid sequence -L- may be present or absent. For instance, when n=2 the hybrid may be NH₂—X₁-L₁-X₂-L₂-COOH, NH₂—X₁—X₂—COOH, NH₂—X₁-L₁-X₂—COOH, NH₂—X₁—X₂-L₂-COOH, etc. Linker amino acid sequence(s) -L- will typically be short (e.g. 20 or fewer amino acids i.e. 20, 19, 18, 17, 16, 15, 14, 13, 12, 11, 10, 9, 8, 7, 6, 5, 4, 3, 2, 1). Examples comprise short peptide sequences which facilitate cloning, poly-glycine linkers (i.e. comprising Glyₙ where n=2, 3, 4, 5, 6, 7, 8, 9, 10 or more), and histidine tags (i.e. His where n=3, 4, 5, 6, 7, 8, 9, 10 or more). Other suitable linker amino acid sequences will be apparent to those skilled in the art. A useful linker is GSGGGG (SEQ ID NO: 7) or GSGSGGGG (SEQ ID NO: 8), with the Gly-Ser dipeptide being formed from a BamHI restriction site, thus aiding cloning and manipulation, and the (Gly)₄ tetrapeptide being a typical poly-glycine linker. Other suitable linkers, particularly for use as the final Lₙ are a Leu-Glu dipeptide or Gly-Ser. Linkers will usually contain at least one glycine residue to facilitate structural flexibility e.g. a -L- moiety may contain 1, 2, 3, 4, 5, 6, 7, 8, 9, 10 or more glycine residues. Such glycines may be arranged to include at least two consecutive glycines in a Gly-Gly dipeptide sequence, or a longer oligo-Gly sequence i.e. Glyₙ where n=2, 3, 4, 5, 6, 7, 8, 9, 10 or more. Other suitable linkers, particularly for use as the final Lₙ are a Leu-Glu dipeptide or SEQ ID NO: 235.

[0793] -A- is an optional N-terminal amino acid sequence. This will typically be short (e.g. 40 or fewer amino acids i.e. 40, 39, 38, 37, 36, 35, 34, 33, 32, 31, 30, 29, 28, 27, 26, 25, 24, 23, 22, 21, 20, 19, 18, 17, 16, 15, 14, 13, 12, 11, 10, 9, 8, 7, 6, 5, 4, 3, 2, 1). Examples include leader sequences to direct protein trafficking, or short peptide sequences which facilitate cloning or purification (e.g. histidine tags i.e. His where n=3, 4, 5, 6, 7, 8, 9, 10 or more). Other suitable N-terminal amino acid sequences will be apparent to those skilled in the art. If X₁ lacks its own N-terminus methionine, —A- is preferably an oligopeptide (e.g. with 1, 2, 3, 4, 5, 6, 7 or 8 amino acids) which provides a N-terminus methionine e.g. Met-Ala-Ser, or a single Met residue. In a nascent polypeptide the -A- moiety can provide the polypeptide's N-terminal methionine (formyl-methionine, fMet, in bacteria). One or more amino acids may be cleaved from the N-terminus of a nascent -A- moiety, however, such that the -A- moiety in a mature polypeptide of the invention does not necessarily include a N-terminal methionine.

[0794] —B— is an optional C-terminal amino acid sequence. This will typically be short (e.g. 40 or fewer amino acids i.e. 39, 38, 37, 36, 35, 34, 33, 32, 31, 30, 29, 28, 27, 26, 25, 24, 23, 22, 21, 20, 19, 18, 17, 16, 15, 14, 13, 12, 11, 10, 9, 8, 7, 6, 5, 4, 3, 2, 1). Examples include sequences to direct protein trafficking, short peptide sequences which facilitate cloning or purification (e.g. comprising histidine tags i.e. His where n=3, 4, 5, 6, 7, 8, 9, 10 or more, such as SEQ ID NO: 9), or sequences which enhance protein stability. Other suitable C-terminal amino acid sequences will be apparent to those skilled in the art, such as a glutathione-S-transferase, thioredoxin, 14 kDa fragment of S.aureus protein A, a biotinylated peptide, a maltose-binding protein, an enterokinase flag, etc.

[0795] It is preferred that -A-, —B— and -L- sequences do not include a sequence that shares 10 or more contiguous amino acids in common with a human polypeptide sequence.

[0796] In some embodiments, a -L- moiety comprises a non-RrgB antigen. In some embodiments, the -A- moiety comprises a non-RrgB antigen, and in some the —B— moiety comprises a non-RrgB antigen.

[0797] The invention also provides nucleic acid which encodes a hybrid polypeptide of the invention.

[0798] Wherein the chimeric protein comprises three clades from RrgB, the hybrid is preferably selected from the list:

RrgB I-II-III
e.g. SEQ ID NO: 246
(also referred to as RrgB123)
RrgB I-III-II
e.g. SEQ ID NO: 248
(also referred to as RrgB132)
RrgB III-II-I
e.g. SEQ ID NO: 250
(also referred to as RrgB321)
RrgB III-I-II
e.g. SEQ ID NO: 252
(also referred to as RrgB312)
RrgB II-III-I
e.g. SEQ ID NO: 254
(also referred to as RrgB231)
RrgB II-I-III
e.g. SEQ ID NO: 256
(also referred to as RrgB213)

[0799] Preferably, the RrgB hybrid is selected from RrgBI-II-III, RrgBIII-II-I, RrgBIII-I-II and RrgBII-III-I. More preferably, the RrgB hybrid is selected from RrgBI-II-III and RrgBIII-II-I. Most preferably, the RrgB hybrid is RrgBIII-II-I.

[0800] Further examples of hybrids include polypeptides that comprise an amino acid sequence selected from the group consisting of: spr2021-spr0057 (e.g. SEQ ID NO: 193); spr2021-spr0096 (e.g. SEQ ID NO: 194); spr2021-spr0565 (e.g. SEQ ID NO: 195 or SEQ ID NO: 196 or SEQ ID NO: 197); spr2021-RrgA (e.g. SEQ ID NO: 198); spr0057-spr2021 (e.g. SEQ ID NO: 199); spr0057-spr0096 (e.g. SEQ ID NO: 200); spr0057-RrgA (e.g. SEQ ID NO: 201); spr0057-spr0565 (e.g. SEQ ID NO: 202 or SEQ ID NO: 203 or SEQ ID NO: 204); spr0096-spr2021 (e.g. SEQ ID NO: 205); spr0096-spr-0057 (e.g. SEQ ID NO: 206); spr0096-RrgA (e.g. SEQ ID NO: 207); spr0096-spr0565 (e.g. SEQ ID NO: 208 or SEQ ID NO: 209 or SEQ ID NO: 210); RrgA-spr2021 (e.g. SEQ ID NO: 211); RrgA-spr0565 (e.g. SEQ ID NO: 212 or SEQ ID NO: 213 or SEQ ID NO: 214); RrgA-spr0057 (e.g. SEQ ID NO: 215); RrgA-spr0096 (e.g. SEQ ID NO: 216); spr0565-spr0057 (e.g. SEQ ID NO: 217 or SEQ ID NO: 218 or SEQ ID NO: 219); spr0565-spr0096 (e.g. SEQ ID NO: 220 or SEQ ID NO: 221 or SEQ ID NO: 222); spr0565-spr2021 (e.g. SEQ ID NO: 223 or SEQ ID NO: 224 or SEQ ID NO: 225); or spr0565-RrgA (e.g. SEQ ID NO: 226 or SEQ ID NO: 227 or SEQ ID NO: 228).

### Combinations of Pneumococcal Protein and Saccharide Antigens

[0801] In addition to a S. pneumoniae protein antigen, compositions of the invention may also include one or more pneumococcal capsular saccharide(s), which will typically be conjugated to carrier protein(s). Further information about such saccharides and conjugation is provided below.

[0802] The individual antigens identified in the antigen groups may be used as carrier proteins for pneumococcal capsular saccharides, to form a covalent conjugate. Thus the invention provides an immunogenic composition comprising a conjugate of (1) an antigen selected from the first, second, third, fourth, fifth, sixth, seventh, eighth, ninth or tenth antigen groups and (2) a pneumococcal capsular saccharide. Further characteristics of such a conjugate are described above. The use of pneumococcal proteins as carriers in conjugates is known in the art [e.g. refs. 122, 124 & 103]. These conjugates may be combined with any of the further antigens disclosed herein.

[0803] Pneumococcal protein antigens may be combined with one or more pneumococcal capsular saccharide(s), which will typically be conjugated to carrier protein(s). Thus the invention provides an immunogenic composition comprising (i) a TLR agonist; (ii) an insoluble metal salt; (iii) one or more S. pneumoniae protein antigen(s) as discussed above, preferably as a mixture or hybrid; and (iv) one or more pneumococcal capsular saccharides.

[0804] The protein antigen in component (iii) is preferably combination of at least two RrgB Glade epitopes.

[0805] A saccharide used in component (iv) of this combination is ideally present as a conjugate comprising a saccharide moiety and a carrier protein moiety. The carrier moiety in the conjugate may be e.g. a single RrgB polypeptide, a hybrid RrgB polypeptide, a non-RrgB pneumococcal polypeptide, or a non-pneumococcal polypeptide.

[0806] The saccharide is from the capsular saccharide of a pneumococcus. The saccharide may be a polysaccharide having the size that arises during purification of the saccharide from bacteria, or it may be an oligosaccharide achieved by fragmentation of such a polysaccharide. In the 7-valent PREVNAR™ product, for instance, 6 of the saccharides are presented as intact polysaccharides while one (the 18C serotype) is presented as an oligosaccharide.

[0807] A composition may include a capsular saccharide from one or more of the following pneumococcal serotypes: 1, 2, 3, 4, 5, 6A, 6B, 7F, 8, 9N, 9V, 10A, 11A, 12F, 14, 15B, 17F, 18C, 19A, 19F, 20, 22F, 23F and/or 33F. A composition may include multiple serotypes e.g. 2, 3, 4, 5, 6, 7, 8, 9, 10, 11, 12, 13, 14, 15, 16, 17, 18, 19, 20, 21, 22, 23 or more serotypes. 7-valent, 9-valent, 10-valent, 11-valent and 13-valent conjugate combinations are already known in the art, as is a 23-valent unconjugated combination.

[0808] For example, a 10-valent combination may include saccharide from serotypes 1, 4, 5, 6B, 7F, 9V, 14, 18C, 19F and 23F. An 11-valent combination may further include saccharide from serotype 3. A 12-valent combination may add to the 10-valent mixture: serotypes 6A and 19A; 6A and 22F; 19A and 22F; 6A and 15B; 19A and 15B; r 22F and 15B; A 13-valent combination may add to the 11-valent mixture: serotypes 19A and 22F; 8 and 12F; 8 and 15B; 8 and 19A; 8 and 22F; 12F and 15B; 12F and 19A; 12F and 22F; 15B and 19A; 15B and 22F. etc. One useful 13-valent combination includes capsular saccharide from serotypes 1, 3, 4, 5, 6A, 6B, 7F, 9V, 14, 18C, 19, 19F and 23F. If saccharides are enclosed then it is preferred to include 1, 2 or 3 of serotypes 1, 5 and 14.

[0809] A carrier protein in a conjugate may or may not be one of the RrgB antigens of (1). If it is not a RrgB antigen it may instead be a different pneumococcal antigen, such as spr0057, spr0096 and spr2021, etc., or pneumolysin [122] or its non-toxic derivatives [123], or pneumococcal surface protein PspA [124], In some embodiments, though, the carrier is not a pneumococcal antigen, and may be e.g. a bacterial toxin or toxoid. Typical carrier proteins are diphtheria or tetanus toxoids or mutants thereof. The CRM₁₉₇ diphtheria toxin mutant [125] is useful, and is the carrier in the PREVNAR™ product. Other suitable carrier proteins include N. meningitidis outer membrane protein complex [126], synthetic peptides [127,128], heat shock proteins [129,130], pertussis proteins [131,132], cytokines [133], lymphokines [133], hormones [133], growth factors [133], artificial proteins comprising multiple human CD4′ T cell epitopes from various pathogen-derived antigens [134] such as N19 [135], protein D from Hinfluenzae [136-138], iron-uptake proteins [139], toxin A or B from C. difficile [140], recombinant P. aeruginosa exoprotein A (rEPA) [141], etc.

[0810] Where a composition includes more than one conjugate, each conjugate may use the same carrier protein or a different carrier protein. Reference 142 describes potential advantages when using different carrier proteins in multivalent pneumococcal conjugate vaccines

[0811] In some embodiments, a single conjugate may carry saccharides from multiple serotypes [143]. Usually, however, each conjugate will include saccharide from a single serotype.

[0812] Conjugates may have excess carrier (w/w) or excess saccharide (w/w). In some embodiments, a conjugate may include equal weights of each.

[0813] The carrier molecule may be covalently conjugated to the carrier directly or via a linker. Direct linkages to the protein may be achieved by, for instance, reductive amination between the saccharide and the carrier, as described in, for example, references 144 and 145. The saccharide may first need to be activated e.g. by oxidation. Linkages via a linker group may be made using any known procedure, for example, the procedures described in references 146 and 147. A preferred type of linkage is an adipic acid linker, which may be formed by coupling a free -NH₂ group (e.g. introduced to a glucan by amination) with adipic acid (using, for example, diimide activation), and then coupling a protein to the resulting saccharide-adipic acid intermediate [148,149]. Another preferred type of linkage is a carbonyl linker, which may be formed by reaction of a free hydroxyl group of a saccharide CDI [150, 151] followed by reaction with a protein to form a carbamate linkage. Other linkers include β-propionamido [152], nitrophenyl-ethylamine [153], haloacyl halides [154], glycosidic linkages [155], 6-aminocaproic acid [156], ADH [157], C₄ to C₁₂ moieties [158], etc. Carbodiimide condensation can also be used [159].

[0814] Further Antigens

[0815] In some embodiments, a composition of the invention includes a S. pneumoniae antigen and also an antigen from a different organism e.g. from a virus (enveloped or non-enveloped), from a Gram-negative bacterium, or from another Gram-positive bacterium.

[0816] These extra antigen(s) may take various forms e.g. a whole organism, an outer-membrane vesicle, a polypeptide, a saccharide, a liposaccharide, a conjugate (e.g. of a carrier and a hapten, or of a carrier and a saccharide or liposaccharide), etc. Where the immunogen is a polypeptide, it will typically be a surface polypeptide e.g. an adhesin, a hemagglutinin, an envelope glycoprotein, a spike glycoprotein, etc.

[0817] For example, the invention can use a S. pneumoniae antigen as discussed herein, in combination (e.g. in admixture) with one or more of the following antigens:
[0818] a polypeptide from Streptococcus agalactiae.
[0819] a capsular saccharide from S.agalactiae, for example from one or more of serotypes Ia, lb, II, III, and/or V.
[0820] a polypeptide from Streptococcus pyogenes.
[0821] a polypeptide from Staphylococcus aureus. For instance, the immunogen may comprise an IsdA antigen, an IsdB antigen, a C1fA antigen, a C1fB antigen, a SdrD antigen, a Spa antigen, an EsxA antigen, an EsxB antigen, a Sta006 antigen, a hemolysin, and/or a Sta011 antigen. Suitable S. aureus immunogens and their combinations are disclosed in reference 160.
[0822] a polypeptide from Staphylococcus epidermidis.
[0823] a capsular saccharide from Neisseria meningitidis. Capsular saccharides are particularly useful for protecting against meningococcal serogroups A, C, W135 and/or Y.
[0824] a polypeptide from N. meningitidis, for example as disclosed in reference 161.
[0825] an outer membrane vesicle from N. meningitidis, for example from a serogroup B strain.
[0826] an antigen from a hepatitis virus, such as a hepatitis A virus, a hepatitis B virus, a hepatitis C virus and/or a hepatitis E virus. For instance, the antigen may be hepatitis B virus surface antigen (HBsAg). A typical amount of HBsAg per unit dose of a vaccine is between 5-20 μg, but lower doses can be used with the invention due to the antigen-sparing nature of the adjuvants.
[0827] a polypeptide antigen from a respiratory syncytial virus. Immunogens may be from a group A RSV and/or a group B RSV. Suitable immunogens may comprise the F and/or G glycoproteins or fragments thereof e.g. as disclosed in references 162 & 163.
[0828] a polypeptide antigen from a Chlamydia bacterium, including C. trachomatis and C. pneumoniae. Suitable immunogens include those disclosed in references 164-170.
[0829] a polypeptide antigen from an Escherichia coli bacterium, including extraintestinal pathogenic strains. Suitable immunogens include those disclosed in references 171-173.
[0830] a polypeptide antigen from a coronavirus, such as the human SARS coronavirus. Suitable immunogens may comprise the spike glycoprotein.
[0831] a polypeptide antigen from Helicobacter pylori bacterium. Suitable immunogens include CagA [174-177], VacA [178,179], and/or NAP [180-182].
[0832] a polypeptide antigen from a Corynebacterium diphtheriae bacterium. Suitable immunogens include diphtheria toxoid.
[0833] a polypeptide antigen from a Clostridium tetani bacterium. Suitable immunogens include tetanus toxoid.
[0834] a polypeptide antigen from a Bordetella pertussis bacterium. Pertussis antigens are either cellular (whole cell, in the form of inactivated B. pertussis cells; ‘wP’) or acellular (‘aP’). Where acellular antigens are used, one, two or (preferably) three of the following antigens are included: (1) detoxified pertussis toxin (pertussis toxoid, or TT'); (2) filamentous hemagglutinin (‘FHA’); (3) pertactin (also known as the ‘69 kiloDalton outer membrane protein’). The PT may be chemically detoxified or may be a mutant PT in which enzymatic activity has been reduced by mutagenesis [183] e.g. the 9K/129G double mutant [184]. As well as PT, FHA and pertactin, it is also possible to include fimbriae (e.g. agglutinogens 2 and 3) in an acellular pertussis antigen component.
[0835] a capsular saccharide antigen from a Haemophilus influenzae type B bacterium (“Hib”). Suitable immunogens include conjugates of the Hib capsular saccharide (“PRP”).
[0836] an inactivated poliovirus antigen. A typical composition will include three poliovirus antigens—poliovirus Type 1 (e.g. Mahoney strain), poliovirus Type 2 (e.g. MEF-1 strain), and poliovirus Type 3 (e.g. Saukett strain).
[0837] a polypeptide antigen from a cytomegalovirus (‘CMV’). For example, the immunogen may be a recombinant glycoprotein B e.g. the soluble antigen used in reference 185.
[0838] a human papillomavirus antigen. Useful immunogens are Ll capsid proteins, which can assemble to form structures known as virus-like particles (VLPs). The VLPs can be produced by recombinant expression of L1 in yeast cells (e.g. in S. cerevisiae) or in insect cells (e.g. in Spodoptera cells, such as Sfrugiperda, or in Drosophila cells). For yeast cells, plasmid vectors can carry the L1 gene(s); for insect cells, baculovirus vectors can carry the L1 gene(s). More preferably, the composition includes L1 VLPs from both HPV-16 and HPV-18 strains. This bivalent combination has been shown to be highly effective [186]. In addition to HPV-16 and HPV-18 strains, it is also possible to include Ll VLPs from HPV-6 and HPV-11 strains.
[0839] a saccharide antigen from a Candida fungus such as C. albicans. For instance, the immunogen may be a β-glucan, which may be conjugated to a carrier protein. The glucan may include β-1,3 and/or β-1,6 linkages. Suitable immunogens include those disclosed in references 187 & 188
[0840] a polypeptide antigen from a Moraxella catarrhalis bacterium.

[0841] Where the additional antigen is a saccharide, it is preferably conjugated to a carrier protein, such as a bacterial toxin (e.g. diphtheria or tetanus toxins, or toxoids or mutants thereof, including the CRM197 diphtheria toxin mutant) or other carrier, as listed above.

[0842] Where a diphtheria antigen is included in the composition it is preferred also to include tetanus antigen and pertussis antigens. Similarly, where a tetanus antigen is included it is preferred also to include diphtheria and pertussis antigens. Similarly, where a pertussis antigen is included it is preferred also to include diphtheria and tetanus antigens. In some embodiments, however, the composition does not comprise all three of (i) a diphtheria toxoid, (ii) a tetanus toxoid and (iii) a pertussis toxoid; thus these compositions are DTP-free.

[0843] Antibodies

[0844] Antibodies against pneumococcal antigens can be used for passive immunisation [189]. Thus the invention provides an antibody that binds to polypeptide comprising one or more of the identified epitopes. Typically, the antibody binds specifically to a polypeptide of the invention. The invention further provides a combination of antibodies for simultaneous, separate or sequential administration, wherein the combination includes at least two of: (a) an antibody which recognises a first amino acid sequence as defined above; (b) an antibody which recognises a second amino acid sequence as defined above; (c) an antibody which recognises a third amino acid sequence as defined above; (d) an antibody which recognises a fourth amino acid sequence as defined above; (a) an antibody which recognises a fifth amino acid sequence as defined above; and/or (a) an antibody which recognises a sixth amino acid sequence as defined above.

[0845] The invention also provides the use of such antibodies and antibody combinations in therapy. The invention also provides the use of such antibodies and antibody combinations in the manufacture of a medicament. The invention also provides a method for treating a mammal comprising the step of administering to the mammal an effective amount of such an antibody or combination. As described above for immunogenic compositions, these methods and uses allow a mammal to be protected against pneumococcal infection.

[0846] The term “antibody” includes intact immunoglobulin molecules, as well as fragments thereof which are capable of binding an antigen. These include hybrid (chimeric) antibody molecules [190, 191]; F(ab′)2 and F(ab) fragments and Fv molecules; non-covalent heterodimers [192, 193]; single-chain Fv molecules (sFv) [194]; dimeric and trimeric antibody fragment constructs; minibodies [195, 196]; humanized antibody molecules [197-199]; and any functional fragments obtained from such molecules, as well as antibodies obtained through non-conventional processes such as phage display. Preferably, the antibodies are monoclonal antibodies. Methods of obtaining monoclonal antibodies are well known in the art. Humanised or fully-human antibodies are preferred.

[0847] Polypeptides used with the Invention

[0848] Polypeptides used with the invention can be prepared in many ways e.g. by chemical synthesis (in whole or in part), by digesting longer polypeptides using proteases, by translation from RNA, by purification from cell culture (e.g. from recombinant expression), from the organism itself (e.g. after bacterial culture, or direct from patients), etc. A preferred method for production of peptides <40 amino acids long involves in vitro chemical synthesis [200,201]. Solid-phase peptide synthesis is particularly preferred, such as methods based on tBoc or Fmoc [202] chemistry. Enzymatic synthesis may also be used in part or in full. As an alternative to chemical synthesis, biological synthesis may be used e.g. the polypeptides may be produced by translation. This may be carried out in vitro or in vivo. Biological methods are in general restricted to the production of polypeptides based on L-amino acids, but manipulation of translation machinery (e.g. of aminoacyl tRNA molecules) can be used to allow the introduction of D-amino acids (or of other non natural amino acids, such as iodotyrosine or methylphenylalanine, azidohomoalanine, etc.) [204]. Where D-amino acids are included, however, it is preferred to use chemical synthesis. Polypeptides may have covalent modifications at the C-terminus and/or N-terminus. Recombinantly-expressed proteins are preferred, particularly for hybrid polypeptides.

[0849] Polypeptides can take various forms (e.g. native, fusions, glycosylated, non-glycosylated, lipidated, non-lipidated, phosphorylated, non-phosphorylated, myristoylated, non-myristoylated, monomeric, multimeric, particulate, denatured, etc.).

[0850] Polypeptides are preferably provided in purified or substantially purified form i.e. substantially free from other polypeptides (e.g. free from naturally-occurring polypeptides), particularly from other pneumococcal or host cell polypeptides, and are generally at least about 50% pure (by weight), and usually at least about 90% pure i.e. less than about 50%, and more preferably less than about 10% (e.g. 5% or less) of a composition is made up of other expressed polypeptides.

[0851] Polypeptides may be attached to a solid support. Polypeptides may comprise a detectable label (e.g. a radioactive or fluorescent label, or a biotin label).

[0852] The term “polypeptide” refers to amino acid polymers of any length. The polymer may be linear or branched, it may comprise modified amino acids, and it may be interrupted by non-amino acids. The terms also encompass an amino acid polymer that has been modified naturally or by intervention; for example, disulfide bond formation, glycosylation, lipidation, acetylation, phosphorylation, or any other manipulation or modification, such as conjugation with a labeling component. Also included within the definition are, for example, polypeptides containing one or more analogs of an amino acid (including, for example, unnatural amino acids, etc.), as well as other modifications known in the art. Polypeptides can occur as single chains or associated chains. Polypeptides can be naturally or non-naturally glycosylated (i.e. the polypeptide has a glycosylation pattern that differs from the glycosylation pattern found in the corresponding naturally occurring polypeptide).

[0853] Strains and Variants

[0854] Many polypeptide antigens are defined above by reference to “spr” nomenclature. This nomenclature refers to the numbering used in reference 205 for unique identification of open reading frames in the

[0855] R6 strain of S. pneumoniae. The basic reference sequence for any “spr” number can easily be found in public gene databases. For instance, GenBank accession number NC_{—}003098 (GI:15902044) is the complete R6 genome sequence (2,038,615 bp), and the individual spr sequences are given as “locus_tag” entries in the genome sequence's “features” section. Thus the amino acid sequence for any given spr number, and its natural coding sequence, can be established unambiguously for strain R6. Functional annotations are also given in the databases.

[0856] The invention is not limited to sequences from the R6 strain. Genome sequences of several other strains of S. pneumoniae are available, including those of 23F [206], 670 [207] and TIGR4 [208,209,210]. Standard search and alignment techniques can be used to identify in any of these (or other) further genome sequences the homolog of any particular spr sequence from R6. Moreover, the available R6 (and other) sequences can be used to design primers for amplification of homologous sequences from other strains. Thus the invention is not limited to R6 sequences, but rather encompasses such variants and homologs from other strains of S. pneumoniae, as well as non-natural variants. In general, suitable variants of a particular SEQ ID NO include its allelic variants, its polymorphic forms, its homologs, its orthologs, its paralogs, its mutants, etc.

[0857] Thus, for instance, polypeptides used with the invention may, compared to the R6 reference sequence, include one or more (e.g. 1, 2, 3, 4, 5, 6, 7, 8, 9, etc.) amino acid substitutions, such as conservative substitutions (i.e. substitutions of one amino acid with another which has a related side chain). Genetically-encoded amino acids are generally divided into four families: (1) acidic i.e. aspartate, glutamate; (2) basic i.e. lysine, arginine, histidine; (3) non-polar i.e. alanine, valine, leucine, isoleucine, proline, phenylalanine, methionine, tryptophan; and (4) uncharged polar i.e. glycine, asparagine, glutamine, cysteine, serine, threonine, tyrosine. Phenylalanine, tryptophan, and tyrosine are sometimes classified jointly as aromatic amino acids. In general, substitution of single amino acids within these families does not have a major effect on the biological activity. The polypeptides may also include one or more (e.g. 1, 2, 3, 4, 5, 6, 7, 8, 9, etc.) single amino acid deletions relative to the R6 sequences. The polypeptides may also include one or more (e.g. 1, 2, 3, 4, 5, 6, 7, 8, 9, etc.) insertions (e.g. each of 1, 2, 3, 4 or 5 amino acids) relative to the R6 sequences.

[0858] Similarly, a polypeptide used with the invention may comprise an amino acid sequence that:
[0859] (a) is identical (i.e. 100% identical) to a sequence disclosed in the sequence listing;
[0860] (b) shares sequence identity (e.g. 60%, 65%, 70%, 75%, 80%, 85%, 90%, 91%, 92%, 93%, 94%, 95%, 96%, 97%, 98%, 99%, 99.5% or more) with a sequence disclosed in the sequence listing;
[0861] (c) has 1, 2, 3, 4, 5, 6, 7, 8, 9 or 10 (or more) single amino acid alterations (deletions, insertions, substitutions), which may be at separate locations or may be contiguous, as compared to the sequences of (a) or (b); and
[0862] (d) when aligned with a particular sequence from the sequence listing using a pairwise alignment algorithm, each moving window of x amino acids from N-terminus to C-terminus (such that for an alignment that extends to p amino acids, where p>x, there are p-x+1 such windows) has at least xy identical aligned amino acids, where: x is selected from 20, 25, 30, 35, 40, 45, 50, 60, 70, 80, 90, 100, 150, 200; y is selected from 0.50, 0.60, 0.70, 0.75, 0.80, 0.85, 0.90, 0.91, 0.92, 0.93, 0.94, 0.95, 0.96, 0.97, 0.98, 0.99; and if xy is not an integer then it is rounded up to the nearest integer. The preferred pairwise alignment algorithm is the Needleman-Wunsch global alignment algorithm [211], using default parameters (e.g. with Gap opening penalty=10.0, and with Gap extension penalty=0.5, using the EBLOSUM62 scoring matrix). This algorithm is conveniently implemented in the needle tool in the EMBOSS package [212].

[0863] Where hybrid polypeptides are used, the individual antigens within the hybrid (i.e. individual —X— moieties) may be from one or more strains. Where n=2, for instance, X₂ may be from the same strain as X₁ or from a different strain. Where n=3, the strains might be (i) X₁═X₂═X₃ (ii) X₁═X₂≠X₃(iii) X₁≠X₂═X₃ (iv) X₁≠X₂≠X₃ or (v) X₁=X₃≠X₂, etc.

[0864] Within group (c), deletions or substitutions may be at the N-terminus and/or C-terminus, or may be between the two termini. Thus a truncation is an example of a deletion. Truncations may involve deletion of up to 40 (or more) amino acids at the N-terminus and/or C-terminus.

[0865] In general, when a polypeptide of the invention comprises a sequence that is not identical to a complete pneumococcal sequence from the sequence listing (e.g. when it comprises a sequence listing with <100% sequence identity thereto, or when it comprises a fragment thereof) it is preferred in each individual instance that the polypeptide can elicit an antibody that recognises the complete pneumococcal sequence.

[0866] Formulae (C), (D), (E) and (H)—TLR 7 agonists

[0867] The TLR agonist can be a compound according to any of formulae (C), (D), (E), and (H):

[chemical structure]

wherein:
[0868] (a) P³ is selected from H, C₁-C₆alkyl, CF₃, and —((CH₂)ₚO)_{q}(CH₂)ₚOₛ— and —Y-L-X—P(O)(OR^{X})(OR^{Y}); and P⁴ is selected from H, C₁-C₆alkyl, —C₁-C₆alkylaryl and —Y-L-X—P(O)(OR^{X})(OR^{Y}); with the proviso that at least one of P³ and P⁴ is —Y-L-X—P(O)(OR^{X})(OR^{Y}),
[0869] (b) P⁵ is selected from H, C₁-C₆alkyl, and —Y-L-X—P(O)(OR^{X})(OR^{Y}); P⁶ is selected from H, C₁-C₆alkyl each optionally substituted with 1 to 3 substituents selected from C₁-C₄alkyl and OH, and —Y-L-X—P(O)(ORNOR^{Y}); and P⁷ is selected from H, C₁-C₆alkyl, —((CH₂)ₚO)ₚ(CH₂)ₚOₛ—, —NHC₁-C₆alkyl and —Y-L-X—P(O)(OR^{X})(OR^{Y}); with the proviso that at least one of P⁵, P⁶ and P⁷ is —Y-L-X—P(O)(OR^{X})(OR^{Y});
[0870] (c) P⁸ is selected from H, C₁-C₆alkyl, C₁-C₆alkoxy, —NHC₁-C₆alkyl each optionally substituted with OH, and —Y-L-X—P(O)(OR^{X})(OR^{Y}); and P⁹ and P¹⁹ are each independently selected from H, C₁-C₆alkyl, C₁-C₆alkoxy, —NHC₁-C₆alkyl each optionally substituted with OH and C₁-C₆alkyl, and —Y-L-X—P(O)(OR^{X})(OR^{Y}); with the proviso that at least one of P^{8′} P⁹ or P¹⁹ is —Y-L-X—P(O)(OR^{X})(OR^{Y});
[0871] (d) P¹⁶ and each P¹⁸ are each independently selected from H, C₁-C₆alkyl, and —Y-L-X—P(O)(OR^{X})(OR^{Y}); P¹⁷ is selected from H, C₁-C₆alkyl, aryl, heteroaryl, C₁-C₆alkylaryl, C₁-C₆alkyl heteroaryl, C₁-C₆alkylaryl-Y-L-X—P(O)(OR^{X})(OR^{Y}) and —Y-L-X—P(O)(OR^{X})(OR^{Y}), each optionally substituted with 1 to 2 substituents selected from C₁-C₆alkyl or heterocyclyl with the proviso that at least one of P^{16′} P¹⁷ or a P¹⁸ contains a —Y-L-X—P(O)(OR^{X})(OR^{Y}) moiety;
[0872] R^{X} and R^{Y} are independently selected from H and C₁-C₆alkyl;
[0873] R^{C}, R^{D} and R^{H} are each independently selected from H and C₁-C₆alkyl;
[0874] X^{C} is selected from CH and N;
[0875] R^{E} is selected from H, C₁-C₆alkyl, C₁-C₆alkoxy, C(O)C₁-C₆alkyl, halogen and —((CH₂)ₚO)_{q}(CH₂)ₚ—;
[0876] X^{E} is selected from a covalent bond, CR^{E2}R^{E3} and NR^{E4};
[0877] R^{E2}, R^{E3} and R^{E4} are independently selected from H and C₁-C₆alkyl;
[0878] X^{H1}-V^{H2} is selected from —CR^{H2}R^{H3}—, —CR^{H2}R^{H3}—CR^{H2}R^{H3}—, —C(O)CR^{H2}R^{H3}—, —C(O)CR^{H2}R^{H3}—, —CR^{H2}R^{H3}C(O)—, —NR^{H4}C(O)—, C(O)NR^{H4}—, CR^{H2}R^{H3}S(O)₂ and —CR^{H2}=CR^{H2}—;
[0879] R^{H2}, R^{H3} and R^{H4} are each independently selected from H, C₁-C₆alkyl and P¹⁸;
[0880] X^{H3} is selected from N and CN;
[0881] X is selected from a covalent bond, O and NH;
[0882] Y is selected from a covalent bond, O, C(O), S and NH;
[0883] L is selected from, a covalent bond C₁-C₆alkylene, C₁-C₆alkenylene, arylene, heteroarylene, C₁-C₆alkyleneoxy and —((CH₂)ₚO)_{q}(CH₂)ₚ— each optionally substituted with 1 to 4 substituents independently selected from halo, OH, C₁-C₄alkyl, —OP(O)(OH)₂ and —P(O)(OH)₂;
[0884] m is selected from 0 or 1;
[0885] each p is independently selected from 1, 2, 3, 4, 5 and 6;
[0886] q is selected from 1, 2, 3 and 4; and
[0887] s is selected from 0 and 1.

### Formula (G)—TLR8 Agonist

[0888] The TLR agonist can be a compound according to formula (G):

[chemical structure]

wherein:
[0889] P¹¹ is selected from H, C₁-C₆alkyl, C₁-C₆ alkoxy, NR^{V}R^{W} and —Y-L-X—P(O)(OR^{X})(OR^{Y});
[0890] P¹² is selected from H, C₁-C₆alkyl, aryl optionally substituted by —C(O)NR^{V}R^{W}, and —Y-L-X—P(O)(OR^{X})(OR^{Y});
[0891] P¹³, P¹⁴ and P¹⁵ are independently selected from H, C₁-C₆alkyl, C₁-C₆ alkoxy and —Y-L-X—P(O)(OR^{X})(OR^{Y});
[0892] with the proviso that at least one of P¹¹, P¹², P¹³, P¹⁴ or P¹⁵ is —Y-L-X—P(O)(OR^{X})(OR^{Y});
[0893] R^{V} and R^{W} are independently selected from H, C₁-C₆alkyl or together with the nitrogen atom to which they are attached form a 4 to 7 remembered heterocyclic ring;
[0894] X^{G} is selected from C, CH and N;
[0895] [symbol] represents an optional double bond, wherein X^{G} is C if [symbol] is a double bond; and
[0896] R^{G} is selected from H and C₁-C₆alkyl;
[0897] X is selected from a covalent bond, O and NH;
[0898] Y is selected from a covalent bond, O, C(O), S and NH;
[0899] L is selected from, a covalent bond C₁-C₆alkylene, C₁-C₆alkenylene, arylene, heteroarylene, C₁-C₆alkyleneoxy and —((CH₂)ₚO)_{q}(CH₂)ₚ— each optionally substituted with 1 to 4 substituents independently selected from halo, OH, C₁-C₄alkyl, —OP(O)(OH)₂ and P(O)(OH)₂;
[0900] each p is independently selected from 1, 2, 3, 4, 5 and 6 and
[0901] q is selected from 1, 2, 3 and 4.

[0902] Formulae (I) and (II)—TLR 7 agonists [6]

[0903] The TLR agonist can be a compound according to formula (I) or formula (II):

[chemical structure]

wherein:
[0904] Z is —NH₂ or —OH;
[0905] X¹ is alkylene, substituted alkylene, alkenylene, substituted alkenylene, alkynylene, substituted alkynylene, carbocyclylene, substituted carbocyclylene, heterocyclylene, or substituted heterocyclylene;
[0906] L¹ is a covalent bond, arylene, substituted arylene, heterocyclylene, substituted heterocyclylene, carbocyclylene, substituted carbocyclylene, —S—, —S(O)—, S(O)₂, —NR⁵—, or —O—
[0907] X² is a covalent bond, alkylene, or substituted alkylene;
[0908] L² is NR⁵—, —N(R⁵)C(O)—, —O—, —S—, —S(O)—, S(O)₂, or a covalent bond;
[0909] R³ is H, alkyl, substituted alkyl, heteroalkyl, substituted heteroalkyl, alkenyl, substituted alkenyl, aryl, substituted aryl, arylalkyl, substituted arylalkyl, heterocyclyl, substituted heterocyclyl, heterocyclylalkyl, or substituted heterocyclylalkyl;
[0910] Y¹ and Y² are each independently a covalent bond, —O— or —NR⁵—; or —Y¹—R¹ and —Y²—R² are each independently —O—N═C(R⁶R²);
[0911] R¹ and R² are each independently H, alkyl, substituted alkyl, carbocyclyl, substituted carbocyclyl, heterocyclyl, substituted heterocyclyl, alkenyl, substituted alkenyl, alkynyl, substituted alkynyl, arylalkyl, substituted arylalkyl, heterocyclylalkyl, substituted heterocyclylalkyl, -alkylene-C(O)—O—R⁵, (substituted alkylene)-C(O)—O—R⁵, -alkylene-O—C(O)—R⁵, —(substituted alkylene)-O—C(O)—R⁵, —alkylene-O—C(O)—O—R⁵, or -(substituted alkylene)-O—C(O)—O—R⁵
[0912] R⁴ is H, halogen, —OH, —O-alkyl, —O-alkylene-O—C(O)—O—R⁵, —O—C(O)—O—R⁵, —SH, or —NH(R⁵);
[0913] each R⁵, R⁶, and R² are independently H, alkyl, substituted alkyl, carbocyclyl, substituted carbocyclyl, heterocyclyl, substituted heterocyclyl, alkenyl, substituted alkenyl, alkynyl, substituted alkynyl, arylalkyl, substituted arylalkyl, heterocyclylalkyl, or substituted heterocyclylalkyl.

[0914] Formula (J)—TLR2 agonists [213]

[0915] The TLR agonist can be a compound according to formula (J):

[chemical structure]

wherein:
[0916] R¹ is H, —C(O)—C₇-C₁₈alkyl or —C(O)—C₁-C₆alkyl;
[0917] R² is C₇-C₁₈alkyl ;
[0918] R³ is C₇-C₁₈alkyl;
[0919] L₁ is —CH₂OC(O)—, —CH₂O—, —CH₂NR⁷C(O)— or —CH₂OC(O)NR⁷—;
[0920] L₂ is —OC(O)—, —O—, —NR⁷C(O)— or —OC(O)NR⁷—;
[0921] R⁴ is -L₃R⁵ or -L₄R⁵;
[0922] R⁵ is —N(R⁷)₂, —P(O)(OR⁷)₂, —C(O)OR⁷, —NR⁷C(O)L₃R⁸, —NR⁷C(O)L₄R⁸, —OL₃R⁶, —C(O)NR⁷L₃R⁸, —C(O)NR⁷L₄R⁸, —S(O)₂OR⁷, —OS(O)₂OR⁷, C₁-C₆alkyl, a C₆aryl, a C₁₀aryl, a C₁₄aryl, 5 to 14 ring membered heteroaryl containing 1 to 3 heteroatoms selected from O, S and N, C₃-C₈cycloalkyl or a 5 to 6 ring membered heterocycloalkyl containing 1 to 3 heteroatoms selected from O, S and N, wherein the aryl, heteroaryl, cycloalkyl and heterocycloalkyl of R⁵ are each unsubstituted or the aryl, heteroaryl, cycloalkyl and heterocycloalkyl of R⁵ are each substituted with 1 to 3 substituents independently selected from —OR⁹, —OL₃R⁶, —OL₄R⁶, —OR⁷, and —C(O)OR⁷;
[0923] L₃ is a C₁-C₁₀alkylene, wherein the C₁-C₁₀alkylene of L₃ is unsubstituted, or the C₁-C₁₀alkylene of L₃ is substituted with 1 to 4 R⁶ groups, or the C₁-C₁ₒalkylene of L₃ is substituted with 2 C₁-C₆alkyl groups on the same carbon atom which together, along with the carbon atom they are attached to, form a C₃-C₈cycloakyl;
[0924] L₄ is —((CR⁷R¹⁰)ₚO)_{q}(CR¹⁰R¹⁰)ₚ— or —(CR¹¹R¹¹)((CR⁷R⁷)ₚO)_{q}(CR¹⁰R¹⁰)ₚ—, wherein each R¹¹ is a C₁-C₆alkyl groups which together, along with the carbon atom they are attached to, form a C₃-C₈cycloakyl;
[0925] each R⁶ is independently selected from halo, C₁-C₆alkyl, C₁-C₆alkyl substituted with 1-2 hydroxyl groups, —OR⁷, —N(R⁷)₂, —C(O)OH, —C(O)N(R⁷)₂, —P(O)(OR⁷)₂, a C₆aryl, a C₁₀aryl and a C₁₄aryl;
[0926] each R⁷ is independently selected from H and C₁-C₆alkyl;
[0927] R⁸ is selected from —SR⁷, —C(O)OH, —P(O)(OR⁷)₂, and a 5 to 6 ring membered heterocycloalkyl containing 1 to 3 heteroatoms selected from O and N;
[0928] R⁹ is phenyl;
[0929] each R¹⁹ is independently selected from H and halo;
[0930] each p is independently selected from 1, 2, 3, 4, 5 and 6, and
[0931] q is 1, 2, 3 or 4.

[0932] Preferably R⁵ is P(O)(OR⁷)₂, —NR⁷C(O)L₃-P(O)(OR⁷)₂, —NR⁷C(O)L₄-P(O)(OR⁷)₂, —OL₃-P(O)(OR⁷)₂, —C(O)NR⁷L₃-P(O)(OR⁷)₂, or —C(O)NR⁷L₄-P(O)(OR⁷)₂.

[0933] In some embodiments of (J), R₁ is H. In other embodiments of (J), R₁ is —C(O)—C₁₅alkyl;

[0934] In some embodiments of (J): (i) L₁ is —CH₂OC(O)— and L₂ is —OC(O)—, —O—, —NR⁷C(O)— or —OC(O)NR⁷—; or (ii) or L₁ is —CH₂O— and L₂ is —OC(O)—, —O—, —NR⁷C(O)— or —OC(O)NR⁷—; or (iii) L₁ is —CH₂NR⁷C(O)— and L₂ is —OC(O)—, —O—, —NR⁷C(O)— or —OC(O)NR⁷—; or (iv) L₁ is —CH₂OC(O)NR⁷— and L₂ is —OC(O)—, —O—, NR⁷C(O)— or —OC(O)NR⁷—.

[0935] In some embodiments of (J): (i) L₁ is —CH₂OC(O)— and L₂ is —OC(O)—; or (ii) L₁ is —CH₂O— and L₂ is —O—; or (iii) L₁ is —CH₂O— and L₂ is —NHC(O)—; or (iv) L₁ is —CH₂OC(O)NH— and L₂ is —OC(O)NH—.

[0936] In some embodiments of (J), (i) R² is —C₁₁alkyl and R³ is —C₁₁alkyl; or (ii) R² is —C₁₆alkyl and R³ is —C₁₆alkyl; or (iii) R² is —C₁₆alkyl and R³ is —C₁₁alkyl; or (iv) R² is -C₁₂alkyl and R³ is -C₁₂alkyl; or (v) R² is —C₇alkyl and R³ is —C₇alkyl; or (vi) R² is —C₉alkyl and R³ is —C₉alkyl; or (vii) R² is —C₁₈alkyl and R³ is —C₈alkyl; or (viii) R² is —C₁₃alkyl and R³ is —C₁₃alkyl; or (ix) R² is —C₁₂alkyl and R³ is —C₁₁alkyl; or (x) R² is —C₁₂alkyl and R³ is —C₁₂alkyl; or (xi) R² is -C₁₀alkyl and R³ is —C₁₀alkyl; or (xii) R² is —C₁₅alkyl and R³ is —C₁₅alkyl.

[0937] In some embodiments of (J), R² is —C₁₁alkyl and R³ is —C₁₁alkyl.

[0938] In some embodiments of (J), L₃ is a C₁-C₁₀alkylene, wherein the C₁-C₁₀alkylene of L₃ is unsubstituted or is substituted with 1 to 4 R⁶ groups.

[0939] In some embodiments of (J): L₄ is —((CR⁷R⁷)ₚO)_{q}(CR¹⁰ R¹⁰)ₚ—; each R¹⁰ is independently selected from H and F; and each p is independently selected from 2, 3, and 4.

[0940] In some embodiments of (J), each R⁶ is independently selected from methyl, ethyl, i-propyl, i-butyl, —CH₂OH, —OH, —F, —NH₂, —C(O)OH, —C(O)NH₂, —P(O)(OH)₂ and phenyl.

[0941] In some embodiments of (J), each R⁷ is independently selected from H, methyl and ethyl.

[0942] Formula (K) [214]

[0943] The TLR agonist can be a compound according to formula (K):

[chemical structure]

wherein:
[0944] R¹ is H, C₁-C₆alkyl, —C(R⁵)₂OH, -L¹R⁵, -L¹R⁶, -L²R⁵, -L²R⁶, —OL²R⁵, or —OL²R⁶;
[0945] L¹ is —C(O)— or —O—;
[0946] L² is C₁-C₆alkylene, C₂-C₆alkenylene, arylene, heteroarylene or —((CR⁴R⁴)ₚO)_{q}(CH₂)ₚ—, wherein the C₁-C₆alkylene and C₂-C₆alkenylene of L² are optionally substituted with 1 to 4 fluoro groups;
[0947] each L³ is independently selected from C₁-C₆alkylene and —((CR⁴R⁴)ₚO)_{q}(CH₂)ₚ—, wherein the C₁-C₆alkylene of L³ is optionally substituted with 1 to 4 fluoro groups;
[0948] L⁴ is arylene or heteroarylene;
[0949] R² is H or C₁-C₆alkyl;
[0950] R³ is selected from C₁-C₄alkyl, L³R⁵, -L¹R⁵, -L³R⁷, -L³L⁴L³R⁷, -L³L⁴R⁵, -L³L⁴L³R⁵, —OL³R⁵, —OL³R⁷, —OL³L⁴R⁷, —OL³L⁴L³R⁷, —OR⁸, —OL³L⁴R⁵, —OL³L⁴L³R⁵ and —C(R⁵)₂OH;
[0951] each R⁴ is independently selected from H and fluoro;
[0952] R⁵ is —P(O)(OR⁹)₂,
[0953] R⁶ is CF₂P(O)(OR⁹)₂ or —C(O)OR¹⁰;
[0954] R⁷ is CF₂P(O)(OR⁹)₂ or —C(O)OR¹⁰;
[0955] R⁸ is H or C₁-C₄alkyl;
[0956] each R⁹ is independently selected from H and C₁-C₆alkyl;
[0957] R¹⁰ is H or C₁-C₄alkyl;
[0958] each p is independently selected from 1, 2, 3, 4, 5 and 6, and
[0959] q is 1, 2, 3 or 4.

[0960] The compound of formula (K) is preferably of formula (K′):

[chemical structure]

wherein:
[0961] P¹ is selected from H, C₁-C₆alkyl optionally substituted with COOH and —Y-L-X—P(O)(OR^{X})(OR^{Y});
[0962] P² is selected from H, C₁-C₆alkyl, C₁-C₆alkoxy and —Y-L-X—P(O)(OR^{X})(OR^{Y});
[0963] with the proviso that at least one of P¹ and P² is —Y-L-X—P(O)(OR^{X})(OR^{Y});
[0964] R^{B} is selected from H and C₁-C₆alkyl;
[0965] R^{X} and R^{Y} are independently selected from H and C₁-C₆alkyl;
[0966] X is selected from a covalent bond, O and NH;
[0967] Y is selected from a covalent bond, O, C(O), S and NH;
[0968] L is selected from, a covalent bond C₁-C₆alkylene, C₁-C₆alkenylene, arylene, heteroarylene, C₁-C₆alkyleneoxy and —((CH₂)ₚO)_{q}(CH₂)ₚ— each optionally substituted with 1 to 4 substituents independently selected from halo, OH, C₁-C₄alkyl, —OP(O)(OH)₂ and —P(O)(OH)₂;
[0969] each p is independently selected from 1, 2, 3, 4, 5 and 6; and
[0970] q is selected from 1, 2, 3 and 4.

[0971] In some embodiments of formula (K′): P¹ is selected from C₁-C₆alkyl optionally substituted with COOH and —Y-L-X—P(O)(OR^{X})(OR^{Y}); P² is selected from C₁-C₆alkoxy and —Y-L-X—P(O)(OR^{X})(OR^{Y}); R^{B} is C₁-C₆alkyl; X is a covalent bond; L is selected from C₁-C₆alkylene and —((CH₂)ₚO)_{q}(CH₂)ₚ— each optionally substituted with 1 to 4 substituents independently selected from halo, OH, C₁-C₄alkyl, —OP(O)(OH)₂ and —P(O)(OH)₂; each p is independently selected from 1, 2 and 3; q is selected from 1 and 2.

[0972] Formula (F)—TLR 7 agonists [7]

[0973] The TLR agonist can be a compound according to formula (F):

[chemical structure]

[0974] wherein:
   [0975] X³ is N;
   [0976] X⁴ is N or CR³
   [0977] X⁵ is —CR⁴═CR⁵—;
   [0978] R¹ and R² are H;
   [0979] R³ is H;
   [0980] R⁴ and R⁵ are each independently selected from H, halogen, —C(O)OR⁷, —C(O)R⁷, —C(O)N(R¹¹R¹²), —N(R¹¹R¹²), —N(R⁹)₂, —NHN(R⁹)₂, —SR⁷, —(CH₂)ₙR⁷, —(CH₂)R⁷, —LR⁸, -LR¹⁰, —OLR⁸, —OLR¹⁰, C₁-C₆alkyl, C₁-C₆heteroalkyl, C₁-C₆halo alkyl, C₂-C₈alkene, C₂-C₈alkyne, C₁-C₆alkoxy, C₁-C₆haloalkoxy, aryl, heteroaryl, C₃-C₈cycloalkyl, and C₃-C₈heterocycloalkyl, wherein the C₁-C₆alkyl, C₁-C₆heteroalkyl, C₁-C₆haloalkyl, C₂-C₈alkene, C₂-C₈alkyne, C₁-C₆alkoxy, C₁-C₆haloalkoxy, aryl, heteroaryl, C₃-C₈cycloalkyl, and C₃-C₈heterocycloalkyl groups of R⁴ and R⁵ are each optionally substituted with 1 to 3 substituents independently selected from halogen, —CN, —NO₂, —R⁷, —OR⁸, —C(O)R⁸, —OC(O)R⁸, —C(O)OR⁸, —N(R⁹)₂, —P(O)(OR⁸)₂, —OP(O)(OR⁸)₂, —P(O)(OR¹⁰)₂. —OP(O)(OR¹⁰)₂, —C(O)N(R⁹)₂, —S(O)₂R⁸, —S(O)R⁸, —S(O)₂N(R⁹)₂, and —NR⁹S(O)₂R⁸;
   [0981] or, R³ and R⁴, or R⁴ and R⁵, or R⁵ and R⁶, when present on adjacent ring atoms, can optionally be linked together to form a 5-6 membered ring, wherein the 5-6 membered ring is optionally substituted with R⁷;
   [0982] each L is independently selected from a bond, —(O(CH₂)ₘ)ₜ—, C₁-C₆alkyl, C₂-C₆alkenylene and C₂-C₆alkynylene, wherein the C₁-C₆alkyl, C₂-C₆alkenylene and C₂-C₆alkynylene of L are each optionally substituted with 1 to 4 substituents independently selected from halogen, —R⁸, —OR⁸, —N(R⁹)₂, —P(O)(OR⁸)₂, —OP(O)(OR⁸)₂, —P(O)(OR¹⁰)₂, and —OP(O)(OR¹⁰)₂;
   [0983] R⁷ is selected from H, C₁-C₆alkyl, aryl, heteroaryl, C₃-C₈cycloalkyl, C₁-C₆heteroalkyl, C₁-C₆haloalkyl, C₂-C₈alkene, C₂-C₈alkyne, C₁-C₆alkoxy, C₁-C₆haloalkoxy, and C₃-C₈heterocycloalkyl, wherein the C₁-C₆alkyl, aryl, heteroaryl, C₃-C₈cycloalkyl, C₁-C₆heteroalkyl, C₁-C₆haloalkyl, C₂-C₈alkene, C₂-C₈alkyne, C₁-C₆alkoxy, C₁-C₆haloalkoxy, and C₃-C₈heterocycloalkyl groups of R⁷ are each optionally substituted with 1 to 3 R¹³ groups, and each R¹³ is independently selected from halogen, —CN, -LR⁹, -LOR⁹, —OLR⁹, -LR¹⁰, -LOR¹⁰, —OLR¹⁰, -LR⁸, -LOR⁸, —OLR⁸, -LSR⁸, -LSR¹⁰, -LC(O)R⁸, —OLC(O)R⁸, -LC(O)OR⁸, -LC(O)R¹⁰, -LOC(O)¹⁰, -LC(O)NR⁹R¹¹, -LC(O)NR⁹R⁸, -LN(R⁹)₂, -LNR⁹R⁸, -LNR⁹R¹⁰, -LC(O)N(R⁹)₂, -LS(O)₂R⁸, -LS(O)R⁸, -LC(O)NR⁸OH, -LNR⁹C(O)R⁸, -LNR⁹C(O)OR⁸, -LS(O)₂N(R⁹)₂, —OLS(O)₂N(R⁹)₂, -LNR⁹S(O)₂R⁸, -LC(O)NR⁹LN(R⁹)₂, -LP(O)(OR⁸)₂, -LOP(O)(OR⁸)₂, -LP(O)(OR¹⁰)₂ and —OLP(O)(OR¹⁰)₂;

[0984] each R⁸ is independently selected from H, —CH(R¹⁰)₂, C₁-C₈alkyl, C₂-C₈alkene, C₂-C₈alkyne, C₁-C₆halo alkyl, C₁-C₆alkoxy, C₁-C₆hetero alkyl, C₃⁻C₈cycloalkyl, C₂-C₈heterocycloalkyl, C₁-C₆hydroxyalkyl and C₁-C₆haloalkoxy, wherein the C₁-C₈alkyl, C₂-C₈alkene, C₂-C₈alkyne, C₁-C₆heteroalkyl, C₁-C₆haloalkyl, C₁-C₆alkoxy, C₃-C₈cycloalkyl, C₂-C₈heterocycloalkyl, C₁-C₆hydroxyalkyl and C₁-C₆haloalkoxy groups of R⁸ are each optionally substituted with 1 to 3 substituents independently selected from —CN, R¹¹, —OR¹¹, —SR¹¹, —C(O)R¹¹, —OC(O)R¹¹, —C(O)N(R⁹)₂, —C(O)OR¹¹, —NR⁹C(O)R¹¹, —NR⁹R¹⁰, —NR¹¹R¹², —N(R⁹)₂, —OR⁹, —OR¹⁰, —C(O)NR¹¹R¹², —C(O)NR¹¹OH, —S(O)₂R¹¹, —S(O)R¹¹, —S(O)₂NR¹¹R¹², —NR¹¹S(O)₂R¹¹, —P(O)(OR¹¹)₂, and —OP(O)(OR¹¹)₂;

[0985] each R⁹ is independently selected from H, —C(O)R⁸, —C(O)OR⁸, —C(O)R¹⁰, —C(O)OR¹⁰, —S(O)₂R¹⁰, —C₁-C₆ alkyl, C₁-C₆ heteroalkyl and C₃-C₆ cycloalkyl, or each R⁹ is independently a C₁-C₆aIkyl that together with N they are attached to form a C₃-C₈heterocycloalkyl, wherein the C₃-C₈heterocycloalkyl ring optionally contains an additional heteroatom selected from N, O and S, and wherein the C₁-C₆ alkyl, C₁-C₆ heteroalkyl, C₃-C₆ cycloalkyl, or C₃-C₈heterocycloalkyl groups of R⁹ are each optionally substituted with 1 to 3 substituents independently selected from —CN, R¹¹, —OR¹¹, —SR¹¹, —C(O)R¹¹, OC(O)R¹¹, —C(O)OR¹¹, —NR¹¹R¹², —C(O)NR¹¹R¹², —C(O)NR¹¹OH, —S(O)₂R¹¹, —S(O)₂NR¹¹R¹², —NR¹¹S(O)₂R¹¹, —P(O)(OR¹¹)₂ and —P(O)(OR¹¹)₂;

[0986] each R¹⁰ is independently selected from aryl, C₃-C₈cycloalkyl, C₃-C₈heterocycloalkyl and heteroaryl, wherein the aryl, C₃-C₈cycloalkyl, C₃-C₈heterocycloalkyl and heteroaryl groups are optionally substituted with 1 to 3 substituents selected from halogen, —R⁸, —OR⁸, —LR⁹, -LOR⁹, —N(R⁹)₂, —NR⁹C(O)R⁸, —NR⁹CO₂R⁸. —CO₂R⁸, —C(O)R⁸ and —C(O)N(R⁹)₂;

[0987] R¹¹ and R¹² are independently selected from H, C₁-C₆alkyl, C₁-C₆heteroalkyl, C₁-C₆haloalkyl, aryl, heteroaryl, C₃-C₈cycloalkyl, and C₃-C₈heterocycloalkyl, wherein the C₁-C₆alkyl, C₁-C₆heteroalkyl, C₁-C₆haloalkyl, aryl, heteroaryl, C₃-C₈cycloalkyl, and C₃-C₈heterocycloalkyl groups of R″ and R¹² are each optionally substituted with 1 to 3 substituents independently selected from halogen, —CN, R⁸, —OR⁸, C(O)R⁸, OC(O)R⁸, —C(O)OR⁸, —N(R⁹)₂, —NR⁸C(O)R⁸, —NR⁸C(O)OR⁸, —C(O)N(R⁹)₂, C₃-C₈heterocycloalkyl, —S(O)₂R⁸, —S(O)₂N(R⁹)₂, —NR⁹S(O)₂R⁸, C₁-C₆haloalkyl and C₁-C₆haloalkoxy;
[0988] or R¹¹ and R¹² are each independently C₁-C₆alkyl and taken together with the N atom to which they are attached form an optionally substituted C₃-C₈heterocycloalkyl ring optionally containing an additional heteroatom selected from N, O and S;
[0989] ring A is an aryl or a heteroaryl, wherein the aryl and heteroaryl groups of Ring A are optionally substituted with 1 to 3 R^{A} groups, wherein each R^{A} is independently selected from —R⁸, —R⁷, —OR⁸, —OR⁸, —R¹⁰, —OR¹⁰, —SR⁸, —NO₂, —CN, —N(R⁹)₂, —NR⁹C(O)R⁸, —NR⁹C(S)R⁸, —NR⁹C(O)N(R⁹)₂, —NR⁹C(S)N(R⁹)₂, —NR⁹CO₂R⁸, —NR⁹NR⁹C(O)R⁸, —NR⁹NR⁹C(O)N(R⁹)₂, —NR⁹NR⁹CO₂R⁸, —C(O)C(O)R⁸, —C(O)CH₂C(O)R⁸, —OC₂R⁸, —(CH₂)ₙCO₂R⁸, —C(O)R⁸, —C(S)R⁸, —C(O)N(R⁹)₂, —C(S)N(R⁹)₂, —OC(O)N(R⁹)₂, —OC(O)R⁸, —C(O)N(OR⁸R⁸, —C(NOR⁸)R⁸, —S(O)₂R⁸, —S(O)₃R⁸, —SO₂N(R⁹)₂, —S(O)R⁸, —NR⁹SO₂N(R⁹)₂, —NR⁹SO₂R⁸, —P(O)(OR⁸)₂, —OP(O)(OR⁸)₂, —P(O)(OR¹⁰)₂, —OP(O)(OR¹⁰)₂, —N(OR⁸)R⁸, —CH═CHCO₂R⁸, —C(═NH)—N(R⁹)₂, and —(CH₂)ₙNHC(O)R⁸ or two adjacent R^{A} substituents on Ring A form a 5-6 membered ring that contains up to two heteroatoms as ring members;
[0990] n is, independently at each occurrence, 0, 1, 2, 3, 4, 5, 6, 7 or 8;
[0991] each m is independently selected from 1, 2, 3, 4, 5 and 6, and
[0992] t is 1, 2, 3, 4, 5, 6, 7 or 8.

[0993] Formulae (C), (D), (E), (G) and (H)

[0994] As discussed above, the TLR agonist can be of formula (C), (D), (E), (G) or (H).

[0995] The ‘parent’ compounds of formulae (C), (D), (E) and (H) are useful TLR7 agonists (see references 5-8 and 215-231) but are preferably modified herein by attachment of a phosphorus-containing moiety.

[0996] In some embodiments of formulae (C), (D) and (E) the compounds have structures according to formulae (C′), (D′) and (E′), shown below:

[chemical structure]

[0997] The embodiments of the invention of formulae (C), (D), (E) and (H) also apply to formulae (C′), (D′), (E′) and (H′).

[0998] In some embodiments of formulae (C), (D), (E), and (H): X is O; L is selected from C₁-C₆alkylene and —((CH₂)ₚO)_{q}(CH₂)ₚ— each optionally substituted with 1 to 4 substituents independently selected from halo, OH, C₁-C₄alkyl, —OP(O)(OH)₂ and —P(O)(OH)₂; each p is independently selected from 1, 2 and 3; and q is selected from 1 and 2.

[0999] In other embodiments of formula (C): P³ is selected from C₁-C₆alkyl, CF₃, and —((CH₂)ₚO)_{q}(CH₂)ₚOₛ— and —Y-L-X—P(O)(OR^{X})(OR^{Y}); P⁴ is selected from —C₁-C₆alkylaryl and —Y-L-X—P(O)(OR^{X})(OR^{Y}); X^{C} is CH; X is a covalent bond; L is selected from C₁-C₆alkylene and —((CH₂)ₚO)_{q}(CH₂)ₚ— each optionally substituted with 1 to 4 substituents independently selected from halo, OH, C₁-C₄alkyl, —OP(O)(OH)₂ and —P(O)(OH)₂; each p is independently selected from 1, 2 and 3; q is 1 or 2.

[1000] In other embodiments of formulae (C), (D), (E), and (H): X is a covalent bond; L is selected from C₁-C₆alkylene and —((CH₂)ₚO)_{q}(CH₂)ₚ— each optionally substituted with 1 to 4 substituents independently selected from halo, OH, C₁-C₄alkyl, —OP(O)(OH)₂ and P(O)(OH)₂; each p is independently selected from 1, 2 and 3; and q is selected from 1 and 2.

[1001] In other embodiments of formula (C): P³ is selected from C₁-C₆alkyl, CF₃, and —((CH₂)ₚO)_{q}(CH₂)ₚOₛ— and —Y-L-X—P(O)(OR^{X})(OR^{Y}); P⁴ is selected from —C₁-C₆alkylaryl and —Y-L-X—P(O)(OR^{X})(OR^{Y}); X^{C} is N; X is a covalent bond; L is selected from C₁-C₆alkylene and —((CH₂)ₚO)_{q}(CH₂)ₚ— each optionally substituted with 1 to 4 substituents independently selected from halo, OH, C₁-C₄alkyl, —OP(O)(OH)₂ and —P(O)(OH)₂; each p is independently selected from 1, 2 and 3; q is selected from 1 and 2.

[1002] In other embodiments of formula (D): P⁵ is selected from C₁-C₆alkyl, and —Y-L-X—P(O)(OR^{X})(OR^{Y}).

[1003] In other embodiments of formula (D): X is O; L is selected from C₁-C₆alkylene and —((CH₂)ₚO)_{q}(CH₂)ₚ— each optionally substituted with 1 to 4 substituents independently selected from halo, OH, C₁-C₄alkyl, —OP(O)(OH)₂ and —P(O)(OH)₂; each p is independently selected from 1, 2 and 3; and q is selected from 1 and 2.

[1004] In other embodiments of formula (D): X is a covalent bond; L is selected from C₁-C₆alkylene and —((CH₂)ₚO)_{q}(CH₂)ₚ— each optionally substituted with 1 to 4 substituents independently selected from halo, OH, C₁-C₄alkyl, —OP(O)(OH)₂ and P(O)(OH)₂; each p is independently selected from 1, 2 and 3; and q is selected from 1 and 2.

[1005] In other embodiments of formula (E): X is O; L is selected from C₁-C₆alkylene and —((CH₂)ₚO)_{q}(CH₂)ₚ— each optionally substituted with 1 to 4 substituents independently selected from halo, OH, C₁-C₄alkyl, —OP(O)(OH)₂ and —P(O)(OH)₂; each p is independently selected from 1, 2 and 3; and q is selected from 1 and 2.

[1006] In other embodiments of formula (E): X is a covalent bond; L is selected from C₁-C₆alkylene and —((CH₂)ₚO)_{q}(CH₂)ₚ— each optionally substituted with 1 to 4 substituents independently selected from halo, OH, C₁-C₄alkyl, —OP(O)(OH)₂ and —P(O)(OH)₂; each p is independently selected from 1, 2 and 3; and q is selected from 1 and 2.

[1007] In other embodiments of formula (E): X^{E} is CH₂, P⁸ is C₁-C₆alkoxy optionally substituted with —Y-L-X—P(O)(OR^{X})(OR^{Y}).

[1008] In other embodiments of formula (E): P⁹ is —NHC₁-C₆alkyl optionally substituted with OH and C₁-C₆alkyl, and —Y-L-X—P(O)(OR^{X})(OR^{Y}).

[1009] In some embodiments, a compound of formula (C) is not a compound in which P⁴ is —Y-L-X—P(O)(OR^{X})(OR^{Y}).

[1010] In some embodiments, in a compound of formula (C), P⁴ is selected from H, C₁-C₆alkyl, —C₁-C₆alkylaryl.

[1011] In some embodiments of formula (H): X^{H1}—X^{H2} is —CR^{H2}R^{H3}, R^{H2} and —R^{H3} are H, X^{H3} is N, X is a covalent bond; L is selected from C₁-C₆alkylene and —((CH₂)ₚO)_{q}(CH₂)ₚ— each optionally substituted with 1 to 4 substituents independently selected from halo, OH, C₁-C₄alkyl, —OP(O)(OH)₂ and P(O)(OH)₂; each p is independently selected from 1, 2 and 3; and q is selected from 1 and 2.

[1012] In some embodiments of formula (H): X^{H1}—X^{H2} is —CR^{H2}R^{H3}, R^{H2} and R^{H3} are H, X^{H3} is N, X is O; L is selected from C₁-C₆alkylene and —((CH₂)ₚO)_{q}(CH₂)ₚ— each optionally substituted with 1 to 4 substituents independently selected from halo, OH, C₁-C₄alkyl, —OP(O)(OH)₂ and —P(O)(OH)₂; each p is independently selected from 1, 2 and 3; and q is selected from 1 and 2.

[1013] The ‘parent’ compounds of formula (G) are useful TLR8 agonists (see references 9 & 10) but are preferably modified herein by attachment of a phosphorus-containing moiety to permit adsorption. In some embodiments of formula (G), the compounds have structures according to formula (G′);

[chemical structure]

[1014] In some embodiments of formula (G) or (G′): X^{G} is [symbol] and represents a double bond.

[1015] In some embodiments of formula (G) or (G′): X is a covalent bond; L is selected from C₁-C₆alkylene and —((CH₂)ₚO)_{q}(CH₂)ₚ— each optionally substituted with 1 to 4 substituents independently selected from halo, OH, C₁-C₄alkyl, —OP(O)(OH)₂ and —P(O)(OH)₂; each p is independently selected from 1, 2 and 3; and q is selected from 1 and 2.

[1016] In some embodiments of formula (G) or (G′): X is O; L is selected from C₁-C₆alkylene and —((CH₂)ₚO)_{q}(CH₂)ₚ— each optionally substituted with 1 to 4 substituents independently selected from halo, OH, C₁-C₄alkyl, —OP(O)(OH)₂ and —P(O)(OH)₂; each p is independently selected from 1, 2 and 3; and q is selected from 1 and 2.

[1017] Pharmaceutical Compositions and Products

[1018] The invention provides various immunogenic compositions. These are ideally pharmaceutical compositions suitable for use in humans. Pharmaceutical compositions usually include components in addition to the TLR agonist, insoluble metal salt and/or immunogen e.g. they typically include one or more pharmaceutical carrier(s) and/or excipient(s). A thorough discussion of such components is available in reference 232.

[1019] Pharmaceutical compositions are preferably in aqueous form, particularly at the point of administration, but they can also be presented in non-aqueous liquid forms or in dried forms e.g. as gelatin capsules, or as lyophilisates, etc.

[1020] Pharmaceutical compositions may include one or more preservatives, such as thiomersal or 2-phenoxyethanol. Mercury-free compositions are preferred, and preservative-free vaccines can be prepared.

[1021] Pharmaceutical compositions can include a physiological salt, such as a sodium salt e.g. to control tonicity. Sodium chloride (NaCl) is typical, which may be present at between 1 and 20 mg/ml e.g. 10+2 mg/ml or 9 mg/ml. Other salts that may be present include potassium chloride, potassium dihydrogen phosphate, disodium phosphate dehydrate, magnesium chloride, calcium chloride, etc.

[1022] Pharmaceutical compositions can have an osmolality of between 200 mOsm/kg and 400 mOsm/kg, e.g. between 240-360 mOsm/kg, or between 290-310 mOsm/kg.

[1023] Pharmaceutical compositions may include compounds (with or without an insoluble metal salt) in plain water (e.g. w.f.i.) but will usually include one or more buffers. Typical buffers include: a phosphate buffer (except in the fifteenth aspect); a Tris buffer; a borate buffer; a succinate buffer; a histidine buffer (particularly with an aluminium hydroxide adjuvant); or a citrate buffer. Buffer salt s will typically be included in the 5-20 mM range. If a phosphate buffer is used then the concentration of phosphate ions should, in some embodiments, be <50 mM (see above) e.g. <10 mM.

[1024] Pharmaceutical compositions typically have a pH between 5.0 and 9.5 e.g. between 6.0 and 8.0.

[1025] Pharmaceutical compositions are preferably sterile.

[1026] Pharmaceutical compositions preferably non-pyrogenic e.g. containing <1 EU (endotoxin unit, a standard measure) per dose, and preferably <0.1 EU per dose.

[1027] Pharmaceutical compositions are preferably gluten free.

[1028] Pharmaceutical compositions are suitable for administration to animal (and, in particular, human) patients, and thus include both human and veterinary uses. They may be used in a method of raising an immune response in a patient, comprising the step of administering the composition to the patient. Compositions may be administered before a subject is exposed to a pathogen and/or after a subject is exposed to a pathogen.

[1029] Pharmaceutical compositions may be prepared in unit dose form. In some embodiments a unit dose may have a volume of between 0.1-1.0 ml e.g. about 0.5 ml.

[1030] The invention also provides a delivery device (e.g. syringe, nebuliser, sprayer, inhaler, dermal patch, etc.) containing a pharmaceutical composition of the invention e.g. containing a unit dose. This device can be used to administer the composition to a vertebrate subject.

[1031] The invention also provides a sterile container (e.g. a vial) containing a pharmaceutical composition of the invention e.g. containing a unit dose.

[1032] The invention also provides a unit dose of a pharmaceutical composition of the invention.

[1033] The invention also provides a hermetically sealed container containing a pharmaceutical composition of the invention. Suitable containers include e.g. a vial.

[1034] The invention also provides a kit comprising first and second kit components, wherein: (i) the first kit component comprises an insoluble metal salt and at least one S. pneumoniae antigen; and (ii) the second kit component comprises a TLR agonist. The second component ideally does not include an insoluble metal salt and/or does not include a S. pneumoniae antigen. The first and second components can be combined to provide a composition suitable for administration to a subject.

[1035] The invention also provides a kit comprising first and second kit components, wherein: (i) the first kit component comprises an insoluble metal salt and a TLR agonist; and (ii) the second kit component comprises at least one S. pneumoniae antigen. The second component ideally does not include an insoluble metal salt and/or a TLR agonist. In some embodiments, the second component is lyophilised. The first and second components can be combined to provide a pharmaceutical composition suitable for administration to a subject.

[1036] The invention also provides a kit comprising first and second kit components, wherein: (i) the first kit component comprises at least one S. pneumoniae antigen and a TLR agonist; and (ii) the second kit component comprises an insoluble metal salt. The second component ideally does not include a S. pneumoniae antigen and/or a TLR agonist. The first and second components can be combined to provide a pharmaceutical composition suitable for administration to a subject.

[1037] In some embodiments these kits comprise two vials. In other embodiments they comprise one ready-filled syringe and one vial, with the contents of the syringe being mixed with the contents of the vial prior to injection. A syringe/vial arrangement is useful where the vial's contents are lyophilised. Usually, though, the first and second kit components will both be in aqueous liquid form.

[1038] Pharmaceutical compositions of the invention may be prepared in various forms. For example, the compositions may be prepared as injectables, either as liquid solutions or suspensions. Solid forms suitable for solution in, or suspension in, liquid vehicles prior to injection can also be prepared (e.g. a lyophilised composition or a spray-freeze dried composition). The composition may be prepared for topical administration e.g. as an ointment, cream or powder. The composition may be prepared for oral administration e.g. as a tablet or capsule, as a spray, or as a syrup (optionally flavoured). The composition may be prepared for pulmonary administration e.g. by an inhaler, using a fine powder or a spray. The composition may be prepared as a suppository or pessary. The composition may be prepared for nasal, aural or ocular administration e.g. as a spray or drops. The composition may be in kit form, designed such that a combined composition is reconstituted just prior to administration to a patient. Such kits may comprise one or more antigens in liquid form and one or more lyophilised antigens. Injectables for intramuscular administration are typical.

[1039] Compositions comprise an effective amount of a TLR agonist i.e. an amount which, when administered to an individual, either in a single dose or as part of a series, is effective for enhancing the immune response to a co-administered S. pneumoniae antigen. This amount can vary depending upon the health and physical condition of the individual to be treated, age, the taxonomic group of individual to be treated (e.g. non-human primate, primate, etc.), the capacity of the individual's immune system to synthesise antibodies, the degree of protection desired, the formulation of the vaccine, the treating doctor's assessment of the medical situation, and other relevant factors. The amount will fall in a relatively broad range that can be determined through routine trials. An amount of between 1-1000 μg/dose can be used e.g. from 5-100 μg per dose or from 10-100 μg per dose, and ideally ≦300 μg per dose e.g. about 5 μg, 10 μg, 20 μg, 25 μg, 50 μg or 100 μg per dose. Thus the concentration of a TLR agonist in a composition of the invention may be from 2-2000 μg/ml e.g. from 10-200 μg/ml,or about 10, 20, 40, 50, 100 or 200 μg/ml, and ideally ≦600 μg/ml.

[1040] Methods of Treatment, and Administration of Immunogenic Compositions

[1041] The invention provides a method of raising an immune response in a subject, comprising the step of administering to the subject a composition of the invention.

[1042] The invention also provides a composition of the invention, for use in a method of raising an immune response in a subject.

[1043] The invention also provides the use of a TLR agonist, insoluble metal salt and S. pneumoniae antigen(s) in the manufacture of a medicament for raising an immune response in a subject.

[1044] The invention also provides the use of (i) a TLR agonist as defined herein and (ii) an insoluble metal salt and (iii) one or more S. pneumoniae antigens, in the manufacture of a medicament (e.g. a vaccine) for raising an immune response in a subject.

[1045] The invention is suitable for raising immune responses in human or non-human animal (in particular mammal) subjects. Compositions prepared according to the invention may be used to treat both children and adults.

[1046] The immune response stimulated by these methods and uses will generally include an antibody response, preferably a protective antibody response. Methods for assessing antibody responses after immunisation are well known in the art.

[1047] Treatment can be by a single dose schedule or a multiple dose schedule. Multiple doses may be used in a primary immunisation schedule and/or in a booster immunisation schedule. Administration of more than one dose (typically two doses) is particularly useful in immunologically nave patients. Multiple doses will typically be administered at least 1 week apart (e.g. about 2 weeks, about 3 weeks, about 4 weeks, about 6 weeks, about 8 weeks, about 10 weeks, about 12 weeks, etc.).

[1048] Chemical Groups

[1049] Unless specifically defined elsewhere, the chemical groups discussed herein have the following meaning when used in present specification:

[1050] The term “alkyl” includes saturated hydrocarbon residues including:
[1051] linear groups up to 10 atoms (C₁-C₁₀), or of up to 6 atoms (C₁-C₆), or of up to 4 atoms (C₁-C₄). Examples of such alkyl groups include, but are not limited, to C₁-methyl, C₂-ethyl, C₃-propyl and C₄-n-butyl.
[1052] branched groups of between 3 and 10 atoms (C₃-C₁₀), or of up to 7 atoms (C₃-C₇), or of up to 4 atoms (C₃-C₄). Examples of such alkyl groups include, but are not limited to, C₃- iso-propyl, C₄-sec-butyl, C₄-iso-butyl, C₄-tert-butyl and C₅-neo-pentyl.

[1053] The term “alkylene” refers to the divalent hydrocarbon radical derived from an alkyl group, and shall be construed in accordance with the definition above.

[1054] The term “alkenyl” includes monounsaturated hydrocarbon residues including:
[1055] linear groups of between 2 and 6 atoms (C₂-C₆). Examples of such alkenyl groups include, but are not limited to, C₂-vinyl, C₃-1-propenyl, C₃-allyl, C₄-2-butenyl
[1056] branched groups of between 3 and 8 atoms (C₃-C₈). Examples of such alkenyl groups include, but are not limited to, C₄-2-methyl-2-propenyl and C₆-2,3-dimethyl-2-butenyl.

[1057] The term alkenylene refers to the divalent hydrocarbon radical derived from an alkenyl group, and shall be construed in accordance with the definition above.

[1058] The term “alkoxy” includes O-linked hydrocarbon residues including:
[1059] linear groups of between 1 and 6 atoms (C₁-C₆), or of between 1 and 4 atoms (C₁-C₄). Examples of such alkoxy groups include, but are not limited to, C₁-methoxy, C₂-ethoxy, C₃-n-propoxy and C₄-n-butoxy.
[1060] branched groups of between 3 and 6 atoms (C₃-C₆) or of between 3 and 4 atoms (C₃-C₄). Examples of such alkoxy groups include, but are not limited to, C₃-iso-propoxy, and C₄-sec-butoxy and tert-butoxy.

[1061] Halo is selected from Cl, F, Br and I. Halo is preferably F.

[1062] The term “aryl” includes a single or fused aromatic ring system containing 6 or 10 carbon atoms;

[1063] wherein, unless otherwise stated, each occurrence of aryl may be optionally substituted with up to 5 substituents independently selected from (C₁-C₆)alkyl, (C₁-C₆)alkoxy, OH, halo, CN, COOR¹⁴, CF₃ and NR¹⁴R¹⁵; as defined above. Typically, aryl will be optionally substituted with 1, 2 or 3 substituents. Optional substituents are selected from those stated above. Examples of suitable aryl groups include phenyl and naphthyl (each optionally substituted as stated above). Arylene refers the divalent radical derived from an aryl group, and shall be construed in accordance with the definition above.

[1064] The term “heteroaryl” includes a 5, 6, 9 or 10 membered mono- or bi-cyclic aromatic ring, containing 1 or 2 N atoms and, optionally, an NR¹⁴ atom, or one NR¹⁴ atom and an S or an O atom, or one S atom, or one O atom; wherein, unless otherwise stated, said heteroaryl may be optionally substituted with 1, 2 or 3 substituents independently selected from (C₁-C₆)alkyl, (C₁-C₆)alkoxy, OH, halo, CN, COOR¹⁴, CF₃ and NR¹⁴R¹⁵; as defined below. Examples of suitable heteroaryl groups include thienyl, furanyl, pyrrolyl, pyrazolyl, imidazoyl, oxazolyl, isoxazolyl, thiazolyl, isothiazolyl, triazolyl, oxadiazolyl, thiadiazolyl, tetrazolyl, pyridinyl, pyridazinyl, pyrimidinyl, pyrazinyl, indolyl, benzimidazolyl, benzotriazolyl, quinolinyl and isoquinolinyl (optionally substituted as stated above). Heteroarylene refers the divalent radical derived from heteroaryl, and shall be construed in accordance with the definition above.

[1065] The term “heterocyclyl” is a C-linked or N-linked 3 to 10 membered non-aromatic, mono- or bi-cyclic ring, wherein said heterocycloalkyl ring contains, where possible, 1, 2 or 3 heteroatoms independently selected from N, NR¹⁴, S(O)_{q} and O; and said heterocycloalkyl ring optionally contains, where possible, 1 or 2 double bonds, and is optionally substituted on carbon with 1 or 2 substituents independently selected from (C₁-C₆)alkyl, (C₁-C₆)alkoxy, OH, CN, CF₃, halo, COOR¹⁴, NR¹⁴R¹⁵ and aryl.

[1066] In the above definitions R¹⁴ and R¹⁵ are independently selected from H and (C₁-C₆)alkyl.

[1067] When a structural formula is defined with a substituent attached to the core of the molecule by an unspecified, or “floating” bond, for example, as for the group P³ in the case of formula (C), this definition encompasses the cases where the unspecified substituent is attached to any of the atoms on the ring in which the floating bond is located, whilst complying with the allowable valence for that atom.

[1068] In the case of compounds of the invention which may exist in tautomeric forms (i.e. in keto or enol forms), for example the compounds of formula (C) or (H), reference to a particular compound optionally includes all such tautomeric forms.

[1069] General

[1070] The term “comprising” encompasses “including” as well as “consisting” e.g. a composition “comprising” X may consist exclusively of X or may include something additional e.g. X+Y.

[1071] The word “substantially” does not exclude “completely” e.g. a composition which is “substantially free” from Y may be completely free from Y. Where necessary, the word “substantially” may be omitted from the definition of the invention.

[1072] The term “about” in relation to a numerical value x is optional and means, for example, x±10%.

[1073] Unless specifically stated, a process comprising a step of mixing two or more components does not require any specific order of mixing. Thus components can be mixed in any order. Where there are three components then two components can be combined with each other, and then the combination may be combined with the third component, etc.

[1074] Where animal (and particularly bovine) materials are used in the culture of cells, they should be obtained from sources that are free from transmissible spongiform encaphalopathies (TSEs), and in particular free from bovine spongiform encephalopathy (BSE). Overall, it is preferred to culture cells in the total absence of animal-derived materials.

[1075] Where a compound is administered to the body as part of a composition then that compound may alternatively be replaced by a suitable prodrug.

[1076] Phosphorous-containing groups employed with the invention may exist in a number of protonated and deprotonated forms depending on the pH of the surrounding environment, for example the pH of the solvent in which they are dissolved. Therefore, although a particular form may be illustrated it is intended, unless otherwise mentioned, for these illustrations to merely be representative and not limiting to a specific protonated or deprotonated form. For example, in the case of a phosphate group, this has been illustrated as —OP(O)(OH)₂ but the definition includes the protonated forms —[OP(O)(OH₂)(OH)]⁺ and —[OP(O)(OH₂)₂]²⁺ that may exist in acidic conditions and the deprotonated forms —[OP(O)(OH)(O)]⁻ and [OP(O)(O)₂]²⁻ that may exist in basic conditions.

[1077] Compounds disclosed herein can exist as pharmaceutically acceptable salts. Thus, the compounds may be used in the form of their pharmaceutically acceptable salts i.e. physiologically or toxicologically tolerable salt (which includes, when appropriate, pharmaceutically acceptable base addition salts and pharmaceutically acceptable acid addition salts).

### BRIEF DESCRIPTION OF THE DRAWINGS

[1078] FIG. 1 provides the repeating units of representative bacterial saccharides for use in the invention.

[1079] FIG. 2 shows chemical structures of S. pneumoniae polysaccharide serotypes 1, 5, 6B, 14, 19F and 23F.

[1080] FIG. 3 shows a schematic representation of the direct reductive amination reaction.

[1081] FIG. 4 shows a conjugation scheme of Pneumococcal polysaccharide serotype 5, 6B, 14, 23F to CRM197.

[1082] FIG. 5 shows a conjugation scheme of Pneumococcal polysaccharide serotype 1 to CRM197.

[1083] FIG. 6 shows a conjugation scheme of Pneumococcal polysaccharide serotype 19F to CRM197.

[1084] FIG. 7 compares the OPKA killing titers post 2 and post 3 for the 30001(14) S. pneumoniae strain. In each pair of columns, the left column represents “post 2” and the right represents “post 3”. Y-axis shows killing titer. X-axis (from left to right) corresponds to (A) PBS+Al—H; (B) PBS+Al—H/K2; (C) PCV13; (D) conjugate 1, 5, 6B, 14, 23F-CRM₁₉₇, 1 μg each antigen+Al—H; (E) conjugate 1, 5, 6B, 14, 23F-CRM₁₉₇, 0.1 μg each antigen+Al—H; (F) conjugate 1, 5, 6B, 14, 23F-CRM₁₉₇, 0.01 μg each antigen+Al—H; (G) conjugate 1, 5, 6B, 14, 23F-CRM₁₉₇, 1 μg each antigen+Al—H/K2; (H) conjugate 1, 5, 6B, 14, 23F-CRM₁₉₇, 0.1 μg each antigen+Al—H/K2; (I) conjugate 1, 5, 6B, 14, 23F-CRM₁₉₇, 0.01 μg each antigen+Al—H/K2.

[1085] FIG. 8 compares the serotype 14 antibody response to a mixture of 1-, 5-, 6B-, 14-, 23F-CRM197 conjugates adjuvanted with Al—H/K2 or Al—H. Y-axis shows mean fluorescence intensity and standard error of the mean. X-axis (from left to right) corresponds to (A) Al—H; (B) Al—H/K2; (C) PCV13; (D) conjugate 1, 5, 6B, 14, 23F-CRM₁₉₇, 1 μg each antigen+Al—H; (E) conjugate 1, 5, 6B, 14, 23F-CRM₁₉₇, 0.1 μg each antigen+Al—H; (F) conjugate 1, 5, 6B, 14, 23F-CRM₁₉₇, 0.01 μg each antigen+Al—H; (G) conjugate 1, 5, 6B, 14, 23F-CRM₁₉₇, 1 μg each antigen+Al—H/K2; (H) conjugate 1, 5, 6B, 14, 23F-CRM₁₉₇, 0.1 μg each antigen+Al—H/K2; (I) conjugate 1, 5, 6B, 14, 23F-CRM₁₉₇, 0.01 μg each antigen+Al—H/K2. *=significant difference.

[1086] FIG. 9 compares the serotype 1 antibody response to a mixture of 1-, 5-, 6B-, 14-, 23F-CRM₁₉₇ conjugates adjuvanted with Al—H/K2 or Al—H. Y-axis shows mean fluorescence intensity and standard error of the mean. X-axis (from left to right) corresponds to (A) Al—H; (B) Al—H/K2; (C) PCV13; (D) conjugate 1, 5, 6B, 14, 23F-CRM₁₉₇, 1μg each antigen+Al—H; (E) conjugate 1, 5, 6B, 14, 23F-CRM₁₉₇, 0.1 μg each antigen+Al—H; (F) conjugate 1, 5, 6B, 14, 23F-CRM₁₉₇, 0.01 μg each antigen+Al—H; (G) conjugate 1, 5, 6B, 14, 23F-CRM₁₉₇, 1 μg each antigen+Al—H/K2; (H) conjugate 1, 5, 6B, 14, 23F-CRM₁₉₇, 0.1 μg each antigen+Al—H/K2; (I) conjugate 1, 5, 6B, 14, 23F-CRM₁₉₇, 0.01 μg each antigen+Al—H/K2. *=significant difference.

[1087] FIG. 10 compares the serotype 5 antibody response to a mixture of 1-, 5-, 6B-, 14-, 23F-CRM₁₉₇ conjugates adjuvanted with Al—H/K2 or Al—H. Y-axis shows mean fluorescence intensity and standard error of the mean. X-axis (from left to right) corresponds to (A) Al—H; (B) Al—H/K2; (C) PCV13; (D) conjugate 1, 5, 6B, 14, 23F-CRM₁₉₇, 1 μg each antigen+Al—H; (E) conjugate 1, 5, 6B, 14, 23F-CRM₁₉₇, 0.1 μg each antigen+Al—H; (F) conjugate 1, 5, 6B, 14, 23F-CRM₁₉₇, 0.01 μg each antigen+Al—H; (G) conjugate 1, 5, 6B, 14, 23F-CRM₁₉₇, 1 μg each antigen+Al—H/K2; (H) conjugate 1, 5, 6B, 14, 23F-CRM₁₉₇, 0.1 μg each antigen+Al—H/K2; (I) conjugate 1, 5, 6B, 14, 23F-CRM₁₉₇, 0.01 μg each antigen+Al—H/K2; (J) serotype 5-CRM₁₉₇ , 1 μg+Al—H; (K) serotype 5-CRM₁₉₇0.1 μg+Al—H; (L) serotype 5-CRM₁₉₇ 1 μg+Al—H/K2;(M) serotype 5-CRM₁₉₇0.1 μg+Al—H/K2.

[1088] FIG. 11 provided a side-by-side comparison of all antibody titers obtained in the microsphere-based immunological assay (MIA) study. Y-axis shows fluorescence intensity log scale. X-axis (from left to right) corresponds to (A) Al—H; (B) Al—H/K2; (C) PCV13; (D) conjugate 1, 5, 6B, 14, 23F-CRM₁₉₇, 1 μg each antigen+Al—H; (E) conjugate 1, 5, 6B, 14, 23F-CRM₁₉₇, 0.1 μg each antigen+Al—H; (F) conjugate 1, 5, 6B, 14, 23F-CRM₁₉₇, 0.01 μg each antigen+Al—H; (G) conjugate 1, 5, 6B, 14, 23F-CRM₁₉₇, 1 μg each antigen+Al—H/K2; (H) conjugate 1, 5, 6B, 14, 23F-CRM₁₉₇, 0.1 μg each antigen+Al—H/K2; (I) conjugate 1, 5, 6B, 14, 23F-CRM₁₉₇, 0.01 μg each antigen+Al—H/K2; (J) serotype 5-CRM₁₉₇, 1 μg+Al—H; (K) serotype 5-CRM₁₉₇0.1 μg+Al—H; (L) serotype 5-CRM₁₉₇ 1 μg+Al—H/K2;(M) serotype 5-CRM₁₉₇0.1 μg+Al—H/K2.

[1089] FIG. 12 compares the OPKA killing titers post 2 for the SPPD (1) S. pneumoniae strain. Y-axis shows killing titer. X-axis (from left to right) corresponds to (A) PBS+Al—H; (B) PBS+Al—H/K2; (C) PCV13; (D) conjugate 1, 5, 6B, 14, 23F-CRM₁₉₇, 1 μg each antigen+Al—H; (E) conjugate 1, 5, 6B, 14, 23F-CRM₁₉₇, 0.1 μg each antigen+Al—H; (F) conjugate 1, 5, 6B, 14, 23F-CRM₁₉₇, 0.01 μg each antigen+Al—H; (G) conjugate 1, 5, 6B, 14, 23F-CRM₁₉₇, 1 μg each antigen+Al—H/K2; (H) conjugate 1, 5, 6B, 14, 23F-CRM₁₉₇, 0.1 μg each antigen+Al—H/K2; (I) conjugate 1, 5, 6B, 14, 23F-CRM₁₉₇, 0.01 μg each antigen+Al—H/K2.

[1090] FIG. 13 compares the OPKA killing titers post 2 and post 3 for the SPPD (1) S. pneumoniae strain. In each pair of columns, the left column represents “post 2” and the right represents “post 3”. Y-axis shows killing titer. X-axis (from left to right) corresponds to (A) PBS+Al—H; (B) PBS+Al—H/K2; (C) PCV13; (D) conjugate 1, 5, 6B, 14, 23F-CRM₁₉₇, 1 μg each antigen+Al—H; (E) conjugate 1, 5, 6B, 14, 23F-CRM₁₉₇, 0.1 μg each antigen+Al—H; (F) conjugate 1, 5, 6B, 14, 23F-CRM₁₉₇, 0.01 μg each antigen+Al—H; (G) conjugate 1, 5, 6B, 14, 23F-CRM₁₉₇, 1 μg each antigen+Al—H/K2; (H) conjugate 1, 5, 6B, 14, 23F-CRM₁₉₇, 0.1 μg each antigen+Al—H/K2; (I) conjugate 1, 5, 6B, 14, 23F-CRM₁₉₇, 0.01 μg each antigen+Al—H/K2.

[1091] FIG. 14 compares the OPKA killing titers post 2 for the STREP(5) S. pneumoniae strain. Y-axis shows killing titer. X-axis (from left to right) corresponds to (A) PBS+Al—H; (B) PBS+Al—H/K2; (C) PCV13; (D) conjugate 1, 5, 6B, 14, 23F-CRM₁₉₇, 1 μg each antigen+Al—H; (E) conjugate 1, 5, 6B, 14, 23F-CRM₁₉₇, 0.1 μg each antigen+Al—H; (F) conjugate 1, 5, 6B, 14, 23F-CRM₁₉₇, 0.01 μg each antigen+Al—H; (G) conjugate 1, 5, 6B, 14, 23F-CRM₁₉₇, 1 μg each antigen+Al—H/K2; (H) conjugate 1, 5, 6B, 14, 23F-CRM₁₉₇, 0.1 μg each antigen+Al—H/K2; (I) conjugate 1, 5, 6B, 14, 23F-CRM₁₉₇, 0.01 μg each antigen+Al—H/K2; (J) serotype 5-CRM₁₉₇ 1 μg+Al—H; (K) serotype 5-CRM_{197 0.1} μg+Al—H; (L) serotype 5-CRM₁₉₇ 1 μg+Al—H/K2;(M) serotype 5-CRM₁₉₇0.1 μg+Al—H/K2.

[1092] FIG. 15 compares the OPKA killing titers post 2 and post 3 for the STREP(5) S. pneumoniae strain. In each pair of columns, the left column represents “post 2” and the right represents “post 3”. Y-axis shows killing titer. X-axis (from left to right) corresponds to (A) PBS+Al—H; (B) PBS+Al—H/K2; (C) PCV13; (D) conjugate 1, 5, 6B, 14, 23F-CRM₁₉₇, lgg each antigen+Al—H; (E) conjugate 1, 5, 6B, 14, 23F-CRM₁₉₇, 0.1 μg each antigen+Al—H; (F) conjugate 1, 5, 6B, 14, 23F-CRM₁₉₇, 0.01 μg each antigen+Al—H; (G) conjugate 1, 5, 6B, 14, 23F-CRM₁₉₇, lgg each antigen+Al—H/K2; (H) conjugate 1, 5, 6B, 14, 23F-CRM₁₉₇, 0.1 μg each antigen+Al—H/K2; (I) conjugate 1, 5, 6B, 14, 23F-CRM₁₉₇, 0.01 μg each antigen+Al—H/K2; (J) serotype 5-CRM₁₉₇ 1μg+Al—H; (K) serotype 5-CRM₁₉₇ 0.1 μg+Al—H; (L) serotype 5-CRM₁₉₇ 1μg+Al—H/K2;(M) serotype 5-CRM₁₉₇ 0.1 μg+Al—H/K2.

[1093] FIG. 16 compares the OPKA killing titers post 2 for the 30001(14) S. pneumoniae strain. Y-axis shows killing titer. X-axis (from left to right) corresponds to (A) PBS+Al—H; (B) PBS+Al—H/K2; (C) PCV13; (D) conjugate 1, 5, 6B, 14, 23F-CRM₁₉₇, 1μg each antigen+Al—H; (E) conjugate 1, 5, 6B, 14, 23F-CRM₁₉₇, 0.1 μg each antigen+Al—H; (F) conjugate 1, 5, 6B, 14, 23F-CRM₁₉₇, 0.01 μg each antigen+Al—H; (G) conjugate 1, 5, 6B, 14, 23F-CRM₁₉₇, 1μg each antigen+Al—H/K2; (H) conjugate 1, 5, 6B, 14, 23F-CRM₁₉₇, 0.1 μg each antigen+Al—H/K2; (I) conjugate 1, 5, 6B, 14, 23F-CRM₁₉₇, 0.01 μg each antigen+Al—H/K22.

[1094] FIG. 17 compares the antibody response of RrgB321 adjuvanted with Al—H, Al—H/K2 or K2. Y-axis shows median mean fluorescence intensity (MFI). X-axis (from left to right) corresponds to (A) PBS; (B) PBS+RrgB321; (C) Al—H+RrgB321; (D) Al—H/K2+RrgB321; (E) K2+RrgB321.

[1095] FIG. 18 compares the OPKA killing titers for the TIGR4 S. pneumoniae strain. Y-axis shows killing titer. X-axis shows sample sera dilution. Bars correspond to (A) PBS; (B) PBS+RrgB321; (C) Al—H+RrgB321; (D) Al—H/K2+RrgB321; (E) RrgB321+K2 (100 μg/ml).

[1096] FIG. 19 compares the OPKA killing titers for the 6B SPEC S. pneumoniae strain. Y-axis shows killing titer. X-axis shows sample sera dilution. Curves correspond to (A) PBS; (B) PBS+RrgB321; (C) Al—H+RrgB321; (D) Al—H/K2+RrgB321; (E) RrgB321+K2 (100 μg/ml).

### MODES FOR CARRYING OUT THE INVENTION

### Saccharide Antigen

[1097] Preparation of S. pneumoniae Polysaccharide Conjugates

[1098] S. pneumoniae polysaccharide serotypes 1, 5, 6B, 14, 19F and 23F were purchased from ATCC or provided by internal sources, and the structural integrity of the polysaccharides was confirmed by NMR analysis. Chemical structures of S. pneumoniae polysaccharide serotypes 1, 5, 6B, 14, 19F and 23F are provided in FIG. 2.

[1099] Conjugates were obtained by covalent conjugation of serotype 1, 5, 6B, 14, 19F and 23F capsular polysaccharides to the CRM₁₉₇ carrier protein via direct reductive amination reaction (FIG. 3).

[1100] Due to differences between the chemical structures of saccharides from the different serotypes, different chemistries were required to conjugate the polysaccharides to the carrier protein. The cis-diols present on serotype 5 (α-L-PneNAc-1,2), 6B (α-D-Gal-1,3 and D-ribitol-5-P), 14 (β-D-Gal-1,4) and 23F (α-L-Rha-1,2 and β-L-Rha-1,4) were oxidized to introduce aldehyde groups, which were coupled to CRM₁₉₇ via a direct reductive amination reaction. The reductive amination reaction involves the amino groups on the side chain of a lysine in the carrier protein and the aldehyde groups introduced in the polysaccharide (see FIG. 4).

[1101] For serotype 1, the carboxylic groups present on the two a-D-GalA of the repeating unit were derivatized with a linker (aminopentandiol (APD)) in the presence of EDAC (N-Ethyl-N′-(3-dimethylaminopropyl)carbodiimide hydrochloride) as condensing reagent. The diol introduced by the linker derivatization was then oxidized to an aldehyde group and coupled to CRM₁₉₇ via direct reductive amination reaction (see FIG. 5).

[1102] For serotype 19F, a structural modification was applied to the reducing-end. First the polysaccharide was hydrolyzed to generate a reducing-end that was reduced to introduce a cis-diol. Then, the oxidation of the diol allowed the introduction of the aldehyde groups for the conjugation to the carrier protein, CRM₁₉₇, via direct reductive amination reaction (see FIG. 6).

[1103] Oxidation of Polysaccharides

[1104] Serotype 5

[1105] The serotype 5 polysaccharide was sized by size-exclusion chromatography (SEC) with using a Sephacryl S1000 resin. The chromatographic step was performed on AktaTM system by measuring UV absorption at 215 nm.

[1106] The polysaccharide was loaded onto the Sephacryl S1000 column equilibrated in 10 mM NaPi/150M NaCl pH 7.2 buffer. The column was performed at 0.5 ml/min flow rate. The polysaccharide was collected in fractions in the first eluted single large peak. The fractions were pooled cutting out the beginning and the tail of the peak (data not shown). The pooled fractions were concentrated 3-4 fold to perform the oxidation reaction, and the target oxidation was 20% mol of polysaccharide repeating unit (MW repeating unit 896).

[1107] Sodium (meta)periodate, NaI0₄, was added to the mixture and gently mixed at room temperature overnight and in the dark. The crude reaction was then dialyzed in a membrane with a 6-8 kDa cut-off. The crude reaction was loaded into the membrane and dialyzed against distilled water (2 L of distilled water for 10 ml of crude reaction), at+4/8° C. The distilled water was changed 2-3 times. Finally, after around 16 hours, the solution was recovered. For maximum product recovery, the membrane was washed twice with distilled water, adding these washings to the solution.

[1108] The oxidized polysaccharide was characterized by reducing groups colorimetric assay (to quantify the aldehyde group introduced), and found to be 4.5% oxidised.

[1109] Serotype 6B

[1110] The reaction was performed at a polysaccharide concentration of 2 mg/ml in 500 mM NaCl buffer. The target oxidation was 40% mol of polysaccharide repeating unit (MW repeating unit 683). NaI0₄, was added and the mixture was gently mixed in the dark, overnight at room temperature. The crude reaction was then dialyzed in a membrane with a 6-8 kDa cut-off. The crude reaction was then loaded into the membrane and dialyzed against distilled water, and the product recovered, as above. The oxidized polysaccharide was characterized by reducing colorimetric assay, and found to be 23% oxidised.

[1111] Serotype 14

[1112] The serotype 14 polysaccharide was sized by SEC with Sephacryl S500 resin. The chromatographic step was performed as above.

[1113] The polysaccharide was loaded onto the Sephacryl S500 column and equilibrated as above. The column was performed at 0.3 ml/min flow rate. The polysaccharide was collected in fractions in the first eluted single large peak, and pooled as above. The pooled fractions were concentrated 2 fold to perform the oxidation reaction. The NaI0₄ step was performed as above, to obtain 0.1M as final concentration, and then the crude reaction was dialyzed in membrane with a lkDa cut-off. The crude reaction was then loaded into the membrane and dialyzed against distilled water, and the product recovered, as above. The oxidized polysaccharide was characterized by reducing colorimetric assay, and found to be 5.5% oxidised.

[1114] Serotype 23F

[1115] The reaction was performed at a polysaccharide concentration of 2 mg/ml in 500 mM NaCl buffer. The target oxidation was 40% mol of polysaccharide repeating unit (MW repeating unit 769). NaIO₄ was added and the mixture was gently mixed, in the dark, overnight at room temperature. The crude reaction was then dialyzed in membrane with a 6-8 kDa cut-off. The crude reaction was then loaded into the membrane and dialyzed against distilled water, and the product recovered, as above. The oxidized polysaccharide was characterized by reducing colorimetric assay, and found to be 21% oxidised.

[1116] Conjugation Reactions

[1117] Serotype 5

[1118] The conjugation reaction was performed with a polysaccharide serotype 5 concentration of 10 mg/mL in Na₂B₄O₇ 100 mM/NaCl 100 mM pH8.4 buffer. The PS:Protein ratio was 1:1 (weight/weight) and PS:NaBCNH₃ ratio was 1:1 (weight/weight). The carrier protein, CRM₁₉₇, was added to a solution of the serotype 5 polysaccharide in Na₂B₄O₇ 100 mM/NCl 100 mM pH8.4 buffer, and then NaBH₃CN was added. The solution was kept at 37° C. for 2 days, and then the reaction was quenched by adding NaBH₄ for 1 hour at room temperature (PS:NaBH₄ ratio was 4:1, weight/weight). The crude reaction was then purified by SEC, allowing separating the peak of unreacted protein and polysaccharide from the peak containing the conjugate.

[1119] The chromatographic step was performed on Akta™ system, and the conjugate was detected by measuring UV absorption at 215 nm, 254 nm and 280 nm. The crude conjugation reaction was loaded onto the Sephacryl S1000 column equilibrated in 10 mM NaPi/150M NaCl pH 7.2 buffer. The column was performed at 0.5 ml/min flow rate. The serotype 5-CRM₁₉₇ conjugate was collected in fractions in the first eluted peak, which appeared mainly as a single large peak, and the fractions were pooled cutting out the peak tail (data not shown).

[1120] After the purification, the conjugate solution was stored at −20° C. SDS-Page was performed to verify the covalent formation of conjugate with NuPAGE 3-8% TrisAcetate Gel, and a Western-Blot analysis was performed to verify the identity of the conjugate. The Western-blot was performed using Anti-CRM mouse serum as primary antibody (1:500) and Anti-Mouse IgG Alkaline Phosphatase serum as secondary antibody (1:5000) with Western Breeze-Chromogenic Western Blot Immunodetection Kit (data not shown).

[1121] The determination of total saccharide in the conjugate was performed by HPAEC-PAD analysis (as described in reference 233) and the determination of protein by MicroBCA assay. Table 1 shows total saccharide and protein results obtained for the serotype 5-CRM₁₉₇ conjugate.

TABLE 1
Total saccharide and protein content in serotype 5-CRM₁₉₇ conjugate

| | Saccharide | Protein | Sacc/Prot |
|---|---|---|---|
| | μg/ml | μg/ml | (w/w) |
| Pn type 5-CRM₁₉₇ | 56.00 | 218.12 | 0.26 |

[1122] Serotype 6B

[1123] The conjugation reaction was performed with a polysaccharide serotype 6B concentration of 5 mg/mL in NaPi 140 mM/NaCl 700 mM pH7.0 buffer. The PS:Protein ratio was 1:1 (weight/weight) and PS:NaBCNH₃ ratio was 1:1 (weight/weight). The carrier protein, CRM₁₉₇, was added to a solution of the serotype 6B polysaccharide in NaPi 140 mM/NaCl 700 mM pH7.0 buffer, and then NaBH₃CN was added. The solution was kept at 37° C. for 2 days, and then the reaction was quenched by adding NaBH₄ for 1 hour at room temperature (PS:NaBH₄ ratio was 6:1, weight/weight). The conjugate was purified by ammonium sulfate precipitation. This purification method allows the removal of the saccharide excess, since the saccharide does not precipitate with the conjugate and remains in solution. Ammonium sulfate (500 mg/mL) was slowly added to the crude conjugate reaction, and the mixture was kept in ice for 10-15 minutes to allow the conjugate to precipitate. The mixture was then centrifuged and the supernatant removed. The pellet, containing the conjugate, was washed 3 times with a saturated ammonium sulfate solution and then dissolved in NaPi 10 mM pH7.2 and stored at -20° C. SDS-Page was performed in order to verify the covalent formation of conjugate with NuPAGE 3-8% TrisAcetate Gel (data not shown).

[1124] The determination of total saccharide in the conjugate was performed by HPAEC-PAD analysis (using different hydrolysis conditions to those reported by reference 233: TFA 4M at 100° C. for 3 hours) and the determination of protein by MicroBCA assay. Table 2 shows total saccharide and protein results obtained for the serotype 6B-CRM₁₉₇ conjugate.

TABLE 2
Total saccharide and protein content in serotype 6B-CRM₁₉₇ conjugate

| | Saccharide | Protein | Sacc/Prot |
|---|---|---|---|
| | μg/ml | μg/ml | (w/w) |
| Pn type 6B-CRM₁₉₇ | 545.17 | 1210.00 | 0.45 |

[1125] Serotype 14

[1126] The conjugation reaction was performed at polysaccharide type 14 concentration of 8-9 mg/mL in NaPi 200 mM/NaCl 1 M pH7.2 buffer. The PS:Protein ratio was 1:1 (weight/weight) and PS:NaBCNH₃ ratio was 1:1 (weight/weight). The carrier protein, CRM₁₉₇, was added to a solution of the polysaccharide type 14 in NaPi 200 mM/NaCl 1 M pH7.2 buffer, and then NaBH₃CN was added. The solution was kept at 37° C. for 2, and then the reaction was quenched by adding NaBH₄ for 1 hour at room temperature (PS:NaBH₄ ratio was 4:1, weight/weight). The crude reaction was purified by SEC. The chromatographic step was performed on AktaTM system, and the conjugate was detected by measuring UV absorption at 215 nm, 254 nm and 280 nm. The crude conjugation reaction was loaded onto the Sephacryl 5500 column equilibrated in 10 mM NaPi/150M NaCl pH 7.2 buffer. The column was performed at 0.3 ml/min flow rate. The serotype 14-CRM₁₉₇ conjugate was collected in fractions in the first eluted peak and appeared mainly as a single large peak. The fractions were pooled cutting out the peak tail (data not shown).

[1127] After the purification, the conjugate solution was stored at −20° C. SDS-Page was performed in order to verify the covalent formation of conjugate with NuPAGE 3-8% TrisAcetate Gel and a Western-Blot was performed to verify the identity of the conjugate. The Western-blot was performed using Anti-CRM (1:500) and Anti-Pn 14 (1:1000) mouse sera as primary antibody and Anti-Mouse IgG Alkaline Phosphatase serum as secondary antibody (1:500) with Western Breeze-Chromogenic Western Blot Immunodetection Kit (data not shown).

[1128] The determination of total saccharide in the conjugate was performed by HPAEC-PAD analysis (using different hydrolysis conditions to those reported by reference 233: TFA 4M at 100° C. for 3 hours) and the determination of protein by MicroBCA assay. Table 3 shows total saccharide and protein results obtained for the serotype 14-CRM₁₉₇ conjugate.

TABLE 3
Total saccharide and protein content in serotype 14-CRM₁₉₇ conjugate

| | Saccharide | Protein | Sacc/Prot |
|---|---|---|---|
| | μg/ml | μg/ml | (w/w) |
| Pn type 14-CRM₁₉₇ | 62.16 | 145.22 | 0.43 |

[1129] Serotype 23F

[1130] The conjugation reaction was performed at polysaccharide concentration of 5 mg/mL in Na₂B₄O₇ 100 mM/NaCl 100 mM pH8.4 buffer. The PS:Protein ratio was 1:1 (weight/weight) and PS:NaBCNH₃ ratio was 1:1 (weight/weight). The carrier protein, CRM₁₉₇, was added to a solution of the polysaccharide in Na₂B₄O₇ 100 mM/NaCl 100 mM pH8.4 buffer, and then NaBH₃CN was added. The solution was kept at 37° C. for 4 days, and was then quenched by adding NaBH₄ for 1 hour at room temperature (PS:NaBH₄ ratio was 6:1, weight/weight). The conjugate was purified by ammonium sulfate precipitation. Ammonium sulfate (500 mg/mL) was slowly added to the crude conjugate reaction, and the mixture was kept in ice for 10-15 minutes to allow the conjugate precipitation, and then centrifuged and the supernatant removed. The pellet, containing the conjugate, was washed 3 times with a saturated ammonium sulfate solution and, and finally the pellet was dissolved in NaPi 10 mM pH7.2 and stored at −20° C. SDS-Page gel was performed in order to verify the covalent formation of conjugate with NuPAGE 3-8% TrisAcetate Gel (data not shown).

[1131] The determination of total saccharide in the conjugate was performed by HPAEC-PAD analysis (as described in reference 233) and the determination of protein by MicroBCA assay. Table 4 shows total saccharide and protein results obtained for the serotype 23F-CRM₁₉₇ conjugate.

TABLE 4
Total saccharide and protein content in serotype 23F-CRM₁₉₇ conjugate

| | Saccharide | Protein | Sacc/Prot |
|---|---|---|---|
| | μg/ml | μg/ml | (w/w) |
| Pn type 23F-CRM₁₉₇ | 423.74 | 2920 | 0.15 |

[1132] Serotype 1

[1133] For serotype 1, the polysaccharide was derivatised. The polysaccharide type 1 was sized by SEC with Sephacryl 51000 resin. The chromatographic step was performed on Akta™ system, and the polysaccharide was detected by measuring UV absorption at 215 nm. The polysaccharide was processed and loaded onto the Sephacryl S1000 column equilibrated in 10 mM NaPi/150M NaCl pH 7.2 buffer. The column was performed at 0.5 ml/min flow rate. The polysaccharide was collected in fractions in the first eluted single large peak, and the fractions were pooled cutting out the beginning and the tail of the peak (data not shown).

[1134] The pooled fractions were concentrated 4-5 fold and then dialyzed in membrane with a 1 kDa cut-off.

[1135] The sized polysaccharide was loaded onto the membrane and dialyzed against distilled water (2 L of distilled water for 10 ml of crude reaction), the distilled water was changed 2-3 times; the dialysis process was carried out at +4/8° C. The product was recovered as above.

[1136] The dialyzed sized polysaccharide was dried to perform the derivatization reaction with AminoPentanDiol (APD). The carboxylic groups of the polysaccharide were derivatized with APD in the presence of EDAC as condensing agent. The reaction was carried out at pH 5 where the water soluble carbodiimides have better performance. The reaction was performed at polysaccharide concentration of 6-7 mg/ml in 10 mM NaPi/200 mM NaCl buffer pH 5. EDAC, 10 equivalent relative to the moles of polysaccharide repeating unit (MW repeating unit 538), was added and the mixture was gently mixed to allow the complete solubilisation, which occurs almost immediately. Then, APD, 14 equivalent relative to the moles of polysaccharide repeating unit, was added to the solution. The reaction was gently stirred for 4 hour at 37° C., and then the crude reaction was dialyzed in a membrane with a 6-8 kDa cut-off. The crude reaction was loaded in the membrane and dialyzed and the product recovered, as above.

[1137] The APD linker introduced on the polysaccharide was oxidized to obtain an aldehyde group from the diol group. The polysaccharide oxidation was performed with a target oxidation of 40% mol of polysaccharide repeating unit (MW repeating unit 538). NaIO₄ was added and the mixture was gently mixed, at the dark, for 5 hours at room temperature.

[1138] The crude oxidized polysaccharide was characterized by formaldehyde colorimetric assay (to quantify the APD introduction) which revealed a 40% of derivatization degree. The crude reaction was purified by PD10 Desalting column, pre-packed, which contains Sephadex G-25 Medium. A PD-10 Desalting column was equilibrated with approximately 25 ml distilled water. Then the crude reaction was then loaded on the column (in a volume of 2.5 ml) and the sample to enter the packed bed completely. The flow-through was recovered and then the column was washed 7 times with 3.5 ml, and each eluate was collected. The flow-through and the eluate have been analyzed by spectrophotometry at 214 nm. The first three eluates were merged and dried. The oxidized polysaccharide was characterized by reducing colorimetric assay (to quantify the aldehyde group introduced), which revealed 6% of APD oxidation.

[1139] The conjugation reaction was performed at a polysaccharide concentration of 2.5-3.0 mg/mL in Na₂B₄O₇ 100 mM/NaCl 300 mM pH8.4 buffer. The PS:Protein ratio was 1:2.5 (weight/weight) and PS:NaBCNH₃ ratio was 1:1 (weight/weight). The carrier protein, CRM₁₉₇, was added to a solution of the polysaccharide type 1 in Na₂B₄O₇ 100 mM/NaCl 300 mM pH8.4 buffer, and then NaBH₃CN was added. The solution was kept at 37° C. for 2 days, and then the reaction was quenched by adding NaBH₄ for 1 hour at room temperature (PS:NaBH₄ ratio was 8:1, weight/weight). The crude reaction was purified by SEC. The chromatographic step was performed on AktaTM system, the conjugate was detected by measuring UV absorption at 215 nm, 254 nm and 280 nm. The crude conjugation reaction was loaded onto the Sephacryl S1000 column equilibrated in 10 mM NaPi/150M NaCl pH 7.2 buffer, and performed at 0.5 ml/min flow rate.

[1140] The serotype 1-CRM₁₉₇ conjugate was collected in fractions in the first eluted peak and appeared mainly as a single large peak. The fractions were pooled cutting out the peak tail (data not shown).

[1141] After the purification, the conjugate solution was stored at -20° C. SDS-Page was performed in order to verify the covalent formation of conjugate with NuPAGE 3-8% TrisAcetate Gel and a Western-Blot analysis to verify the identity of the conjugate. The Western-blot was performed using anti-CRM mouse serum as primary antibody (1:500) and Anti-Mouse IgG Alkaline Phosphatase serum as secondary antibody (1:5000) with Western Breeze-Chromogenic Western Blot Immunodetection Kit (data not shown).

[1142] The determination of protein in the conjugate was performed by MicroBCA assay. Instead for the saccharide concentration a theoretical value was calculated, assuming a saccharide/protein ratio of 0.25 (weight/weight), due to the technical issue with HPAEC-PAD analysis. Table 5 shows total saccharide and protein results obtained for serotype 1-CRM₁₉₇ conjugate.

TABLE 5
Total saccharide and protein content in serotype 5-CRM₁₉₇ conjugate

| | Saccharide | Protein | Sacc/Prot |
|---|---|---|---|
| | μg/ml | μg/ml | (w/w) |
| Pn type 1-CRM₁₉₇ | 100.00* | 399.27 | 0.25 |

*Theoretical value

[1143] Serotype 19F

[1144] For serotype 19F, the polysaccharide was derivatised. The reducing-end unit of the polysaccharide type 19F was modified in order to generate aldehyde groups useful for the conjugation with the protein. The polysaccharide was hydrolyzed in 5 mM AcOH at concentration of 10 mg/ml for 2 hours at 120° C. After 2 hours, the crude reaction was neutralized at pH 6.5-7.0. The structural identity of hydrolyzed polysaccharide was confirmed by ¹H and ³¹P NMR spectroscopy (data not shown). The NMR samples were prepared by dissolving the dry hydrolyzed polysaccharide in 750 ᵢal of deuterium oxide. Aliquot (750 μl) of the sample was transferred to 5-mm NMR tubes. For data acquisition and processing, all NMR experiments (¹H and ³¹P) have been recorded at 25° C. on Bruker 400 MHz spectrometers, and using 5-mm broadband probes. For data acquisition and processing TOPSPIN 2.1 software package was used. 1-D proton NMR spectra have been collected using a standard one-pulse experiment. Chemical shifts were referenced to HDO at 4.79 ppm (¹H).

[1145] The hydrolyzed polysaccharide was lyophilized to perform the reduction reaction. The reaction was performed at polysaccharide concentration of 5 mg/ml in 20 mM NaPi pH8.2 buffer and 40 mM NaBH₄ for 2 hours at room temperature. Then, the crude reaction was dialyzed in a membrane with a 1 kDa cut-off. The crude reaction was loaded in the membrane and dialyzed as above, and the product recovered as above. The reduced polysaccharide was characterized by ¹H and ³¹P NMR analysis to verify and confirm the structural identity after the reduction step (data not shown).

[1146] The reduced

[chemical structure]

polysaccharide was lyophilized to perform the oxidation reaction. The reaction was carried out at polysaccharide concentration of 100 mg/ml in 10 mM NaPi pH 7.2 buffer. NaIO₄, 10 equivalent relative to mol of polysaccharide (MW of polysaccharide=MW repeating unit, 559, x DP) was added to obtain a final concentration of 50 mM NaIO₄, and the mixture was gently mixed, in the dark, for 4 hours at room temperature. The crude reaction was then purified by PD10 Desalting column equilibrated with approximately 25 ml distilled water. Then, the crude reaction was loaded onto the column (in a volume of 2.5 ml) and allowed the sample to enter the packed bed completely. The flow-through was recovered and then the column was washed with 3.5 ml water for 5 times, each eluted was collected. The first eluted was collected and dried. The oxidized polysaccharide was characterized by ¹H NMR analysis (data not shown). After oxidation of polysaccharide with NaI0₄ new peaks appear in the anomeric region, which can be assigned to the protons of the adduct at the reducing end terminus and the Glc residue linked in α and β conformation.

[1147] In addition, a lower intensity signal appears in the CH₃ region due to the smaller chain length obtain after the oxidation.

[1148] The conjugation reaction was performed at polysaccharide concentration of 5 mg/mL in NaPi 150 mM/NaCl 800 mM pH7.0 buffer. The PS:Protein ratio was 4:1 (weight/weight) and PS:NaBCNH₃ ratio was 2:1 (weight/weight). The carrier protein, CRM₁₉₇, was added to a solution of the polysaccharide in NaPi 150 mM/NaCl 800 mM pH7.0 buffer, and then NaBH₃CN was added. The solution was kept at 37° C. for 2 days.

[1149] The conjugate was purified by ammonium sulfate precipitation, as above. The pellet, containing the conjugate, was washed 3 times with a saturated ammonium sulfate solution and, at the end, the pellet was dissolved in Tris 10 mM pH7.2 and stored at −20° C. SDS-Page gel was performed in order to verify the covalent formation of conjugate with NuPAGE 3-8% TrisAcetate Gel (data not shown).

[1150] The determination of total saccharide in the conjugate was performed by HPAEC-PAD analysis (as described in reference 233) and the determination of protein by MicroBCA assay. Table 6 shows total saccharide and protein results obtained for serotype 19F-CRM₁₉₇ conjugate.

TABLE 6
Total saccharide and protein content in serotype 19F-CRM₁₉₇ conjugate

| | Saccharide | Protein | Sacc/Prot |
|---|---|---|---|
| | μg/ml | μg/ml | (w/w) |
| Pn type 19F-CRM₁₉₇ | 300.59 | 2157.00 | 0.14 |

[1151] Vaccine Preparation and Administration

[1152] References 214 and 234 disclose TLR7 agonists having formula (K) as discussed above. One of these compounds, 3-(5-amino-2-(2-methyl-4-(2-(2-(2-phosphonoethoxy)ethoxy)ethoxy)phenethyl)benzo[f]-[1,7]naphthyridin-8-yl)propanoic acid is referred to hereafter as compound “K2”:

[chemical structure]

[1153] Compound K2 is added to water at 4 mg/ml, then 1M NaOH is added to ensure full solubilisation, with stirring for 15 minutes at room temperature. This material is added to a suspension of aluminium hydroxide adjuvant (Al—H; 2 mg/ml) to give the desired final concentration. This mixture is shaken for 2 hours at ambient temperature to ensure full adsorption, and then histidine buffer components are added (10 mM histidine buffer, pH 6.5).

[1154] The compound can also be used as an arginine salt monohydrate (obtained by mixing 98 mg of the compound with 1.7 ml of 0.1M arginine in 80/20 methanol/water to give a 57 mg/mL solution, followed by addition of 7 ml ethanol to precipirate the salt) in which case it is seen that the NaOH is not required for solubilisation prior to mixing with the Al—H. 100 μg K2 was administered per dose, in a 100 μl dosage volume); the Al—H concentration is always 2 mg/ml. At all strengths >95% of compound K2 is adsorbed to the Al—H. The adsorbed adjuvant is referred to hereafter as “Al—H/K2”.

[1155] The five polysaccharide CRM conjugates (serotypes 1, 5, 6B, 14 and 23F) are mixed sequentially with Al—H/K2 to give a final concentration of 1, 0.1, or 0.01 μg per dose for each glycoconjugate. The order in which the glycoconjugates is added has little effect.

[1156] Immunisation Schemes

[1157] 8 Balb/c mice were used per immunisation group. Mice received intramuscular immunisation of 1, 0.1, or 0.01 μg of polysaccharide, adjuvanted with Al—H or Al—H/K2. Adjuvant controls were included. Volume per administration was 100 μl (50 μl per leg). Positive control was the aluminium phosphate-adjuvanted 13-valent conjugate vaccine (PCV13, Prevnar), which contains serotypes 1, 3, 4, 5, 6A, 6B, 7F, 9V, 14, 18C, 19A, 19F, and 23F each conjugated to CRM₁₉₇. Each 100 μl dose of PCV13 comprises 25 μg aluminium phosphate adjuvant, ˜0.44 μg of each saccharide from serotypes 1, 3, 4, 5, 6A, 7F, 9V, 14, 18C, 19A, 19F, and 23F, and 0.88 pl of serotype 6B saccharide. Mice were immunised on days 0 (“post 1”), 14 (“post 2”) and 28 (“post 3”). Sera were obtained 2 weeks after second and third immunisations (i.e. post 2 and post 3, respectively).

TABLE 7
Immunisation scheme

| Group | Mice | Antigen Name | Ant Dose | Adjuvant |
|---|---|---|---|---|
| 1 | 1-8 | Al—H | — | Al—H |
| 2 | 9-16 | Al—H/K2 | — | Al—H/K2 |
| 3 | 17-24 | PVC13 | — | — |
| 4 | 25-32 | Conj type 1-, 5-, | 1 μg for each | A—-H |
| | | 6B-, 14-, 23F-CRM | | |
| 5 | 33-40 | Conj type 1-, 5-, | 0.1 μg for each | Al—H |
| | | 6B-, 14-, 23F-CRM | | |
| 6 | 41-48 | Conj type 1-, 5-, | 0.01 μg for each | Al—H |
| | | 6B-, 14-, 23F-CRM | | |
| 7 | 49-56 | Conj type 1-, 5- | 1 μg for each | Al—H/K2 |
| | | 6B-, 14-, 23F-CRM | | |
| 8 | 57-64 | Conj type 1-, 5- | 0.1 μg for each | Al—H/K2 |
| | | 6B-, 14-, 23F-CRM | | |
| 9 | 65-72 | Conj type 1-, 5-, | 0.01 μg for each | Al—H/K2 |
| | | 6B-, 14-, 23F-CRM | | |
| 10 | 72-80 | Conj type 5-CRM | 1 μg | Al—H |
| 11 | 81-88 | Conj type 5-CRM | 0.1 μg | Al—H |
| 12 | 89-96 | Conj type 5-CRM | 1 μg | Al—H/K2 |
| 13 | 97-104 | Conj type 5-CRM | 0.1 μg | Al—H/K2 |

[1158] Microsphere-Based Immunological Assay Results

[1159] An indirect MIA assay was performed to compare the adjuvant effects of Al—H and Al—H/K2 on the conjugates detailed in Table 7.

[1160] Statistical analyses were performed using the Mann-Whitney test (p-value) to evaluate significance between groups immunized with different adjuvant at the same dose. Titers of IgG in serum were expressed as means of individual serum samples from 8 mice+/−standard errors of the means.

[1161] Serotype 14-Antibody Titers Against Mixture of 1-, 5-, 6B-, 14-, 23F-CRM₁₉₇ Conjugates Adjuvanted with Al—H or Al—H/K2

[1162] FIG. 8 compares the serotype 14 antibody response to a mixture of 1-, 5-, 6B-, 14-, 23F-CRM₁₉₇ conjugates adjuvanted with Al—H/K2 or Al—H. These data demonstrate that, at antigen concentrations 0.1 μg and 0.01 μg per antigen, adjuvanting with Al—H/K2 leads to a significantly higher anti-serotype 14 immune response than adjuvanting with Al—H.

[1163] At the highest conjugate dose tested (1 μg per antigen), there was no statistically significant difference between MFI results when adjuvanted with Al—H/K2 or Al—H. As indicated by the outlier in the “conj+Al—H” column in FIG. 8 however, one of the Al—H-adjuvanted vaccinations was unsuccessful, generating an MFI measurement similar to the Al—H-only control. By contrast, the Al—H/K2 adjuvanted vaccinations generated consistent MFI values.

[1164] Therefore, Al—H/K2 allows good immune responses when using lower aluminium concentrations, although this effect is less apparent at higher antigen doses. Moreover, compositions adjuvanted with Al—H/K2 performed at least as well as the PCV13 control, adjuvanted with aluminium phosphate.

[1165] Serotype 1-Antibody Titers Against Mixture of 1-, 5-, 6B-, 14-, 23F-CRM₁₉₇ Conjugates Adjuvanted with Al—H or Al—H/K2

[1166] FIG. 9 compares the serotype 1 antibody response to a mixture of 1-, 5-, 6B-, 14-, 23F-CRM₁₉₇ conjugates adjuvanted with Al—H/K2 or Al—H. These data demonstrate that, at all antigen concentrations tested (0.01, 0.1 and 1 μg per antigen), adjuvanting with Al—H/K2 leads to significantly higher anti-serotype 1 immune response than Al—H.

[1167] No significant statistical difference was observed between Al—H/K2-adjuvanted groups receiving 0.1 or 1 μg dose, per antigen (p-value=0.19).

[1168] These data show that adjuvanting with Al—H/K2 allows good immune responses when using less aluminium. This effect is less apparent at higher doses but at higher doses, Al—H/K2 performs as well as Al—H. Moreover, compositions adjuvanted with Al—H/K2 performed similar to the PCV13 control, adjuvanted with aluminium phosphate.

[1169] Serotype 5-Antibody Titers Against Mixture of 1-, 5-, 6B-, 14-, 23F-CRM₁₉₇ Conjugates Adjuvanted with Al—H or Al—H/K2

[1170] FIG. 10 compares the serotype 5 antibody response to a mixture of 1-, 5-, 6B-, 14-, 23F-CRM₁₉₇ conjugates adjuvanted with Al—H/K2 or Al—H. These data demonstrate that Al—H/K2 performs as well as Al—H at adjuvanting an anti- serotype 5 immune response. Moreover, compositions adjuvanted with Al—H/K2 performed similar to the PCV 13 control, adjuvanted with aluminium phosphate.

[1171] Summary of IgG Titers

[1172] As indicated above, with Al—H/K2 represents an alternative to Al—H for adjuvanting anti-saccharide immune responses to conjugated saccharides, and in many cases, Al—H/K2 represents an improvement over Al—H. FIG. 11 provides a side-by-side comparison of all antibody titers obtained in the MIA study. These data demonstrate that immunisation with the mixture of 1-, 5-, 6B-, 14-, 23F-CRM₁₉₇ elicits an immune response to each of the saccharides tested (serotypes 1, 5 and 14). The anti-serotype 14 immune response is particularly high.

[1173] FIG. 11 also demonstrates that the anti-serotype 5 immune response following vaccination with a mixture of conjugated antigens 1-, 5-, 6B-, 14-, 23F-CRM₁₉₇ is comparable to the anti-serotype 5 immune response following vaccination with serotype 5-CRM₁₉₇ alone. This suggests that administration of conjugated saccharide antigens as a mixture does not lead to antigen interference.

[1174] Opsonophagocytosis Killing Assay (OPKA)

[1175] OPKA was performed to test in vitro the functionality of antibodies raised in mice vaccinated with the glycoconjugate vaccines described in Table 7. Sera were obtained after second and third immunisations (denoted “post 2” and “post 3”, respectively). OPKA is recognized by the World Health Organisation as a gold standard for licensing glycoconjugated vaccines for S. pneumoniae.

[1176] The OPKA methodology is well known. Briefly, mouse sera are pooled, heat inactivated for 30′ at 56° C. then diluted (3 fold serial dilutions, initial dilution 1:12). Bacteria are grown up to OD 0.5, divided in aliquots while staying on ice and stored at −80° C. Frozen stocks are used directly in the assay, ˜1200 CFUs/well. In this assay, strains SPPD (ST1), STREP5 (ST5), and 30001 (ST14) were tested. HL-60 cells (ATCC N° ^{CCL240TM}) propagated in vitro and differentiated with 0.8% Dimethylformamide (DMF) for 5 days (bacteria/cells ratio 1:400). Complement source was Baby Rabbit Complement previously screened for toxicity and activity, final concentration 12% (batch 2000, Liquid). All reaction components were incubated 1 hour at 37° C.+5% CO2. 5 μl from each well were spotted on THY agar plates which were incubated overnight at 37° C.+5% CO₂ Read Out at T60 (after 1 hr incubation). CFU/ml in test serum was compared to CFU/ml without test serum.

[1177] Internal Acceptance Criteria were B0 or input (Bacteria loaded initially in the plate): after overnight incubation we verified the number of CFU/spot (between 60-80). Bacteria viability: B1 (after 60′)/B0≧2.5 fold. Background signal in pre-immune and placebo samples are attributed to an unspecific killing (NSK). NSK %={CFU in Control B (Bacteria+HL60+active complement)/CFU in Control A (Bacteria+HL60+inactive complement)}×100. Comparative killing % in positive control (OMNI sera, anti whole bacteria antibodies produced in rabbit).

[1178] OPKA Results

[1179] SPPD (STI) Strain

[1180] FIG. 12 compares the killing titers post 2 for the SPPD (1) S. pneumoniae strain. These data demonstrate that adjuvanting the mixture of 1-, 5-, 6B-, 14-, 23F-CRM₁₉₇ conjugates with Al—H provides kililing titers comparable to adjuvant-only controls. Al—H was found to be ineffective at all antigen concentrations tested. By contrast, adjuvanting the mixture of conjugated saccharide antigens with Al—H/K2 provided a high level killing titer that exceeded the PCV13 positive control at all concentrations rested. In particular, vaccinating with the highest antigen concentration tested (1 ug of each antigen), and adjuvanting with Al—H/K2 significantly outperformed even the positive control.

[1181] These data suggest that adjuvanting a mixture of serotype 1-, 5-, 6B-, 14-, 23F-CRM₁₉₇ conjugates with Al—H/K2 elicits high level killing titers against the SPPD (1) S. pneumoniae strain. Moreover, compositions adjuvanted with Al—H/K2 performed similar to the PCV13 control, adjuvanted with aluminium phosphate.

[1182] FIG. 13 compares the killing titers post 3 for the SPPD (1) S. pneumoniae strain. These data demonstrate that adjuvanting the mixture of 1-, 5-, 6B-, 14-, 23F-CRM₁₉₇ conjugates with Al—H provides kililing titers comparable to adjuvant-only controls, even after a third immunisation. By contrast, mixtures adjuvanted with Al—H/K2 elicited high level killing titers against this strain, at all antigen concentrations tested. Although killing titer levels were higher post 3 than post 2, there was not a striking difference between these titers. This contrasts the killing titers observed following vaccination with the positive control, PCV13, which required a third immunisation to achieve killing titers comparable to the Al—H/K2-adjuvanted mixture containing lug of each antigen.

[1183] Overall, Al—H/K2 was observed to be a far more effective adjuvant than Al—H at eliciting killing titers against the SPPD (1) S. pneumoniae strain, particularly at the highest antigen concentration tested. Interestingly, there were no striking differences between Al—H/K2-adjuvanted responses post 2 and post 3. Moreover, compositions adjuvanted with Al—H/K2 performed similar to the PCV13 control, adjuvanted with aluminium phosphate.

[1184] STREP(5) Strain

[1185] FIG. 14 compares the killing titers post 2 for the STREP(5) S. pneumoniae strain. Sera were obtained from mice vaccinated with the mixture of 1-, 5-, 6B-, 14-, 23F-CRM₁₉₇ conjugates, or only the serotype 5-CRM₁₉₇ conjugate, adjuvanted with Al—H or Al—H/K2. These data demonstrate that the positive control, PCV13 induces only a low level killing titer against this strain. Similarly, the mixture of 1-, 5-, 6B-, 14-, 23F-CRM₁₉₇ conjugates provided low level killing titer against this strain, even when adjuvanted with Al—H/K2. Similar data were observed with Al—H-adjuvanted vaccines comprising only the serotype 5-CRM₁₉₇ conjugate.

[1186] Surprisingly, these data demonstrate that vaccination with only the serotype 5-CRM₁₉₇ conjugate, adjuvanted with Al—H/K2 provides an extremely high killing titer against the STREP(5) strain that significantly exceeds the killing titer achieved by the positive control. Moreover, compositions adjuvanted with Al—H/K2 performed similar to the PCV13 control, adjuvanted with aluminium phosphate.

[1187] FIG. 15 compares the killing titers post 3 for the STREP(5) S. pneumoniae strain. These data demonstrate that the positive control, PCV13 induces only a low level killing titer against this strain, even after the third immunisation, and similarly low level killing titers were observed for Al—H-adjuvanted vaccines. By contrast, the killing titer for the mixture adjuvanted with Al—H/K2 (0.01 μg of each antigen) was significantly enhanced post 3, and was far superior to Al—H-adjuvanted mixture and the positive control. Similarly, killing titers following vaccination with the serotype 5-CRM₁₉₇ conjugate, adjuvanted with Al—H/K2, were found to be significantly increased post 3.

[1188] Overall, Al—H/K2 was again observed to be a far more effective adjuvant than Al—H at eliciting killing titers against the STREP(5) S. pneumoniae strain after administering the mixture of 1-, 5-, 6B-, 14-, 23F-CRM₁₉₇ conjugates (0.01 μg per antigen). Similarly high killing titers were observed using the serotype 5-CRM₁₉₇ conjugate adjuvanted with Al—H/K2. Moreover, compositions adjuvanted with Al—H/K2 significantly outperformed the PCV13 control, adjuvanted with aluminium phosphate.

[1189] There were also striking differences between Al—H/K2-adjuvanted responses post 2 and post 3, whereas Al—H-adjuvanted mixtures elicited killing titers comparable to the adjuvant-only controls.

[1190] 30001 (14) Strain

[1191] FIG. 16 compares the killing titers post 2 for the 300001(14) S. pneumoniae strain. These data demonstrate that adjuvanting the mixture of 1-, 5-, 6B-, 14-, 23F-CRM₁₉₇ conjugates with Al—H/K2 provides significantly higher kililing titers against the the 300001(14) strain than when adjuvanted with Al—H, and all antigen concentrations tested. Similarly, the mixture adjuvanted with Al—H/K2 far exceeded the killing titer against this strain achieved by vaccination with the positive control, PCV13.

[1192] Interestingly, the killing titer achieved using the Al—H/K2-adjuvanted saccharide conjugate mixture was higher following vaccination with 0.01 or 0.1 μg of each antigen than 1 μg of each antigen. Moreover, compositions adjuvanted with Al—H/K2 performed similar to the PCV13 control, adjuvanted with aluminium phosphate.

[1193] FIG. 7 compares the killing titers post 3 for the 300001(14) S. pneumoniae strain. These data demonstrate that adjuvanting the mixture of 1-, 5-, 6B-, 14-, 23F-CRM₁₉₇ conjugates with Al—H provides kililing titers worse than the positive control. Also, the killing titers for the positive control and Al—H-adjuvanted mixtures post 3 were the same or less than post 2. By contrast, the Al—H/K2-adjuvanted mixtures significantly outperformed Al—H-adjuvanted mixtures and the positive control post 3. Although killing titer levels were higher post 3 than post 2, there was not a striking difference between titers obtained using 0.01 μg or 1 μg of each antigen. Surprisingly however, killing titers observed using 0.1 μg of each antigen, adjuvanted with Al—H/K2 increased significantly post 3, compared to post 2. Moreover, compositions adjuvanted with Al—H/K2 performed at least as well as the PCV13 control, adjuvanted with aluminium phosphate.

[1194] Overall, Al—H/K2 was again observed to be a far more effective adjuvant than Al—H at eliciting killing titers against the 300001(14) S. pneumoniae strain, particularly when 0.01 μg of each antigen was used. Al—H/K2-adjuvanted responses post 2 and post 3 were surprisingly higher when 0.01 μg of each antigen was used.

### Protein Antigen

[1195] Preparation of S. pneumoniae RrgB321

[1196] The combination of RrgB321 used in this study corresponds to a fusion between RrgB sequences from (3) Taiwan-23F (2) Finland 6B-12 (1) TIGR4, and thus comprises pili of clades III, II and I. Details of RrgB321 are provided in references 235 and 236. RrgB321 was expressed with a His tag. The final RrgB321 vaccine composition contains antigen (0.4 mg/ml), compound K2 (2 mg/ml), Al—H (2 mg/ml), NaCl (9 mg/ml), histidine buffer (10 mM, pH 6.5), formulation volume: 0.05 ml (in water).

[1197] In some immunisation groups, some formulation components were omitted. In these cases the formulation process simply proceeded to the next step.#

[1198] Adsorption Studies

[1199] To determine whether the K2 remains adsorbed to Al—H, compositions were prepared as above. HPLC analyses revealed that at least 97% K2 remains adsorbed to Al—H (2 mg/ml). SDS-PAGE analyses revealed that RrgB321 consistently adsorbed to Al—H with high efficiency (>95% adsorption) in the absence of K2, and approximately 50% in the presence of K2. Therefore, the antigen is largely adsorbed in the presence of K2, while K2 is almost entirely adsorbed into Al—H. Neither antigen nor K2 showed detectable degradation patterns after formulation.

[1200] Immunisation Schemes

[1201] 8 C57BL/6 mice were used per immunisation group. Mice received intramuscular immunisation of RrgB321, adjuvanted with Al—H or Al—H/K2. Each dose contained 20 μg RrgB321, 2 mg/ml Al—H and/or 100 μg K2 (as appropriate). Adjuvant controls were included. Volume per administration was 50 μl (into one leg). Mice were immunised after days 0 (priming), 14 (first boost), and 28 (second boost). Sera were obtained at day 38.

TABLE 8
Immunisation scheme

| Group | Antigen Name |
|---|---|
| 1 | Omniserum |
| 2 | RrgB321 + K2 |
| 3 | PBS |
| 4 | PBS + RrgB321 |
| 5 | Al—H + RrgB321 |
| 6 | Al—H/K2 + RrgB321 |

[1202] Adjuvant Effect on Antibody Response to RrgB

[1203] The microsphere-based immunological assay (MIA) was performed to compare the adjuvant effects of Al—H, Al—H/K2 and K2 on RrgB321 (see FIG. 17). The MIA assay (Luminex technology) is well known, and is described in e.g. reference 237.

[1204] These data, expressed in MFI, demonstrate that RrgB321 adjuvanted with Al—H/K2 elicits a significantly higher antibody response (approximately 3 times higher) than when adjuvanted with Al—H. Interestingly, administration of RrgB321 in combination with only K2 (i.e. omiting Al—H from Al—H/K2) did not elicit a detectable antibody response. This suggests that adsorption of Al—H to K2 may be important for adjuvanting an immune response, and that co-delivery of Al—H and K2 may be important for eliciting an optimal immune response.

[1205] Opsonophagocytosis Killing Assay (OPKA)

[1206] OPKA was performed to test in vitro the functionality of antibodies raised in mice vaccinated with the compositions above. Sera were obtained. A positive control rabbit polyclonal antiserum was also used, called “Omniserum”. The OPKA assay is well known, and is described in e.g. reference 237. In this assay, strains TIGR4 and 6B SPEC were tested.

[1207] OPKA Results

[1208] TIGR4

[1209] FIG. 18 compares the killing titers for the TIGR4 S. pneumoniae strain. These data demonstrate that antiserum obtained following immunisation with RrgB321 adjuvanted with Al—H/K2 proved very effective at killing TIGR4 cells in vitro, with a calculated titer of 844 (see Table 9). Adjuvanting with Al—H alone was found to be less effective at killing TIGR4 cells in vitro, with a calculated titer (the dilution of a test serum at which 50% of bacteria killing is observed) of 26.

TABLE 9

| | Titer |
|---|---|
| PBS | <12 |
| PBS + RrgB321 | <12 |
| Al—H (RrgB321 adsorbed) | 26 |
| Al—H/K2 (RrgB321 adsorbed) | 844 |
| RrgB321 + K2 (100 ul/ml) | <12 |

[1210] Immunisation with RrgB321 alone (adjuvanted with PBS) was able to induce approximately 40% killing, whereas immunisation with RrgB321 mixed with K2 alone elicited antibodies with minimal in vitro function.

[1211] 6B SPEC

[1212] FIG. 19 compares the killing titers for the 6B SPEC S. pneumoniae strain. These data again demonstrate that antiserum obtained following immunisation with RrgB321 adjuvanted with Al—H/K2 proved very effective at killing 6B SPEC cells in vitro, with a calculated titer of 401 (see Table 10). Adjuvanting with Al—H alone was significantly less effective at killing 6B SPEC cells in vitro, with a calculated titer of <12.

TABLE 10

| | Titer |
|---|---|
| PBS | <12 |
| PBS + RrgB321 | <12 |
| Al—H (RrgB321 adsorbed) | <12 |
| Al—H/K2 (RrgB321adsorbed) | 401 |
| RrgB321 + K2 (100 ul/ml) | <12 |

[1213] Interestingly, immunisation with RrgB321 mixed with K2 alone elicited antibodies with minimal in vitro function.

[1214] These data demonstrate that adjuvanting compositions comprising S. pneumoniae protein antigen(s) with TLR agonist and an aluminium salt causes strong increase in serum opsonophagocytic activity, compared to alum salt, or TLR agonist alone. This indicates a much higher functional activity against S. pneumoniae strains of Glade I and II, and likely also strains of Glade III.

[1215] It will be understood that the invention has been described by way of example only and modifications may be made whilst remaining within the scope and spirit of the invention.

### REFERENCES

[1216] [1] WO2012/072769.

[1217] [2] WO2012/031140.

[1218] [3] Rosenberg et al. (2010) J Immunol 184:136.20.

[1219] [4] U.S. Pat. No. 4,666,886.

[1220] [5] WO2009/118296.

[1221] [6] WO2008/005555.

[1222] [7] WO2009/111337.

[1223] [8] WO2009/067081.

[1224] [9] WO2007/040840.

[1225] [10] WO2010/014913.

[1226] [11] UK patent application GB-A-2220211.

[1227] [12] Myers et al. (1990) pages 145-156 of Cellular and molecular aspects of endotoxin reactions.

[1228] [13] Ulrich (2000) Chapter 16 (pages 273-282).

[1229] [14] Johnson et al. (1999) J Med Chem 42:4640-9.

[1230] [15] Baldrick et al. (2002) Regulatory Toxicol Pharmacol 35:398-413.

[1231] [16] WO 94/21292.

[1232] [17] Vaccine Design . . . (1995) eds. Powell & Newman. ISBN: 030644867X. Plenum.

[1233] [18] Clausi et al. (2008) J Pharm Sci DOI 10.1002/jps.21390.

[1234] [19] WHO Technical Report Series No. 927, 2005. Pages 64-98.

[1235] [20] US-2008/0102498.

[1236] [21] US-2006/0228381.

[1237] [22] Watson (2000) Pediatr Infect Dis J19:331-332.

[1238] [23] Rubin (2000) Pediatr Clin North Am 47:269-285, v.

[1239] [24] Jedrzejas (2001) Microbiol Mol Biol Rev 65:187-207.

[1240] [25] Vaccines (2008) eds. Plotkin, Orenstein and Offit. ISBN 978-1-4160-3611-1.

[1241] [26] Jones (2005) An. Acad. Bras. Cienc, 77(2) 293-324.

[1242] [27] Jones (2005) J Pharm Biomed Anal 38 840-850.

[1243] [28] US-2007/0231340.

[1244] [29] US-2007/0184072.

[1245] [30] US-2006/0228380.

[1246] [31] WO2008/143709.

[1247] [32] Research Disclosure, 453077 (January 2002)

[1248] [33] EP-A-0378881.

[1249] [34] EP-A-0427347.

[1250] [35] WO93/17712

[1251] [36] WO94/03208.

[1252] [37] WO98/58668.

[1253] [38] EP-A-0471177.

[1254] [39] WO91/01146

[1255] [40] Falugi et al. (2001) Eur J Immunol 31:3816-3824.

[1256] [41] Baraldo et al. (2004) Infect Immun 72(8):4884-7.

[1257] [42] EP-A-0594610.

[1258] [43] Ruan et al. (1990) J Immunol 145:3379-3384.

[1259] [44] WO00/56360.

[1260] [45] Kuo et al. (1995) Infect Immun 63:2706-13.

[1261] [46] Michon et al. (1998) Vaccine. 16:1732-41.

[1262] [47] WO02/091998.

[1263] [48] WO01/72337

[1264] [49] WO00/61761.

[1265] [50] WO00/33882

[1266] [51] WO2007/071707

[1267] [52] WO99/42130.

[1268] [53] U.S. Pat. No. 4,761,283.

[1269] [54] U.S. Pat. No. 4,356,170.

[1270] [55] U.S. Pat. No. 4,882,317.

[1271] [56] U.S. Pat. No. 4,695,624.

[1272] [57] Mol. Immunol., 1985, 22, 907-919

[1273] [58] EP-A-0208375.

[1274] [59] Bethell G. S. et al., J. Biol. Chem., 1979, 254, 2572-4

[1275] [60] Hearn M. T. W., J. Chromatogr., 1981, 218, 509-18

[1276] [61] WO00/10599.

[1277] [62] Geyer et al., Med. Microbiol. Immunol, 165: 171-288 (1979).

[1278] [63] U.S. Pat. No. 4,057,685.

[1279] [64] U.S. Pat. Nos. 4,673,574; 4,761,283; 4,808,700.

[1280] [65] U.S. Pat. No. 4,459,286.

[1281] [66] U.S. Pat. No. 4,965,338.

[1282] [67] U.S. Pat. No. 4,663,160.

[1283] [68] WO2007/000343.

[1284] [69] Bagnoli et al. (2008) J Bacteriol. 190(15):5480-92.

[1285] [70] WO2007/116322.

[1286] [71] LeMieux et al. (2006) Infect Immun 74:2453-6.

[1287] [72] Nelson et al. (2007) Mol Microbiol 66:329-40.

[1288] [73] PCT/EP2011/071566

[1289] [74] Needleman & Wunsch (1970) J. Mol. Biol. 48, 443-453.

[1290] [75] Rice et al. (2000) Trends Genet 16:276-277.

[1291] [76] WO02/079241

[1292] [77] WO02/34773.

[1293] [78] WO00/06737.

[1294] [79] WO00/06738.

[1295] [80] WO00/58475.

[1296] [81] WO2003/082183..

[1297] [82] WO2004/092209.

[1298] [83] Kirkham et al. (2006) Infect Immun. 74(1):586-93.

[1299] [84] WO2005/108580.

[1300] [85] Berry et al. (1999) Infect Immun 67(2):981-5.

[1301] [86] U.S. Pat. No. 6,716,432.

[1302] [87] WO90/06951.

[1303] [88] WO99/03884.

[1304] [89] Baba et al. (2002) Infect Immun 70: 107-113.

[1305] [90] U.S. Pat. No. 7,217,791

[1306] [91] WO2008/061953.

[1307] [92] Cao et al. (2007) Vaccine 25(27):4996-5005.

[1308] [93] WO2005/063283.

[1309] [94] WO2003/104272.

[1310] [95] WO00/37105.

[1311] [96] Adamou et al. (2001) Infect Immun. 69(2):949-58.

[1312] [97] WO00/37105.

[1313] [98] Adamou et al. (2001) Infect Immun. 69(2):949-58.

[1314] [99] WO98/18930.

[1315] WO02/22168

[1316] Wizemann et al. (2001) Infect Immun 69:1593-8.

[1317] WO99/53940.

[1318] WO02/22167.

[1319] WO02/08426.

[1320] WO01/12219.

[1321] Briles et al. (2000) J Infect Dis 182:1694-1701.

[1322] Talkington et al. (1996) Microb Pathog. 21(1):17-22.

[1323] WO00/76540.

[1324] Bethe et al. (2001) FEMS Microbiol Lett. 205(1):99-104.

[1325] WO01/81380.

[1326] Brown et al. (2001) Infect Immun 69:6702-6.

[1327] Whalan et al. (2005) FEMS Immunol Med Microbiol 43:73-80.

[1328] Jomaa et al. (2006) Vaccine. 24(24):5133-9.

[1329] Giefing et al. (2008) J Exp Med 205:117-131.

[1330] Findeis et al., Trends Biotechnol. (1993) 11:202

[1331] Chiou et al. (1994) Gene Therapeutics: Methods And Applications Of Direct Gene Transfer. ed. Wolff

[1332] Wu et al., J. Biol. Chem. (1988) 263:621

[1333] Wu et al., J. Biol. Chem. (1994) 269:542

[1334] Zenke et al., Proc. Natl. Acad. Sci. (USA) (1990) 87:3655

[1335] Wu et al., J. Biol. Chem. (1991) 266:338

[1336] WO2009/016515

[1337] Kuo et al. (1995) Infect Immun 63:2706-13.

[1338] Michon et a/. (1998) Vaccine. 16:1732-41.

[1339] WO02/091998.

[1340] Research Disclosure, 453077 (January 2002).

[1341] EP-A-0372501.

[1342] EP-A-0378881.

[1343] EP-A-0427347.

[1344] WO93/17712.

[1345] WO94/03208.

[1346] WO98/58668.

[1347] EP-A-0471177.

[1348] WO91/01146.

[1349] Falugi et al. (2001) Eur J Immunol 31:3816-3824.

[1350] Baraldo et al. (2004) Infect Immun 72(8):4884-7.

[1351] EP-A-0594610.

[1352] Ruan et al. (1990) J Immunol 145:3379-3384.

[1353] WO00/56360.

[1354] WO01/72337.

[1355] WO00/61761.

[1356] WO00/33882

[1357] WO2007/071707

[1358] WO99/42130.

[1359] U.S. Pat. No. 4,761,283.

[1360] U.S. Pat. No. 4,356,170.

[1361] U.S. Pat. No. 4,882,317.

[1362] U.S. Pat. No. 4,695,624.

[1363] Mol. Immunol., 1985, 22, 907-919

[1364] EP-A-0208375.

[1365] Bethell G. S. et al., J. Biol. Chem., 1979, 254, 2572-4

[1366] Hearn M. T. W., J. Chromatogr., 1981, 218, 509-18

[1367] WO00/10599.

[1368] Geyer et al., Med. Microbiol. Immunol, 165 : 171-288 (1979).

[1369] U.S. Pat. No. 4,057,685.

[1370] U.S. Pat. Nos. 4,673,574; 4,761,283; 4,808,700.

[1371] U.S. Pat. No. 4,459,286.

[1372] U.S. Pat. No. 4,965,338.

[1373] U.S. Pat. No. 4,663,160.

[1374] WO2007/000343.

[1375] WO2010/119343.

[1376] Giuliani et al. (2006) Proc Natl Acad Sci USA. 103:10834-9.

[1377] WO95/27787.

[1378] WO03/010317.

[1379] WO2007/110700.

[1380] WO2006/138004.

[1381] WO2005/084306.

[1382] WO2005/002619.

[1383] WO03/049762.

[1384] WO02/02606.

[1385] WO00/37494.

[1386] WO2008/020330.

[1387] WO2006/091517.

[1388] WO2006/089264.

[1389] Covacci & Rappuoli (2000) J. Exp. Med. 19:587-592.

[1390] WO93/18150.

[1391] Covacci et al. (1993) Proc. Natl. Acad. Sci. USA 90:5791-5795.

[1392] Tummuru et al. (1994) Infect. Immun. 61:1799-1809.

[1393] Marchetti et al. (1998) Vaccine 16:33-37.

[1394] Telford et al. (1994) J. Exp. Med. 179:1653-1658.

[1395] Evans et al. (1995) Gene 153:123-127.

[1396] WO96/01272 & WO96/01273, especially SEQ ID NO:6.

[1397] WO97/25429.

[1398] Rappuoli et al. (1991) TIBTECH 9:232-238.

[1399] Nencioni et al. (1991) Infect Immun. 59(2): 625-30.

[1400] Dasarai et al. (2011) J Gen Virol PMID: 21307228.

[1401] Harper et al. (2004) Lancet 364(9447):1757-65. WO03/097091.

[1402] Cassone & Torosantucci (2006) Expert Rev Vaccines 5:859-67.

[1403] Brandt et al. (2006) J Antimicrob Chemother. 58(6):1291-4. Epub 2006 Oct 26

[1404] Winter et al., (1991) Nature 349:293-99

[1405] U.S. Pat. No. 4,816,567.

[1406] Inbar et al., (1972) Proc. Natl. Acad. Sci. U.S.A. 69:2659-62.

[1407] Ehrlich et al., (1980) Biochem 19:4091-96.

[1408] Huston et al., (1988) Proc. Natl. Acad. Sci. U.S.A. 85:5897-83.

[1409] Pack et al., (1992) Biochem 31, 1579-84.

[1410] Cumber et al., (1992) J. Immunology 149B, 120-26.

[1411] Riechmann et al., (1988) Nature 332, 323-27.

[1412] Verhoeyan et al., (1988) Science 239, 1534-36.

[1413] GB 2,276,169.

[1414] Bodanszky (1993) Principles of Peptide Synthesis (ISBN: 0387564314).

[1415] Fields et al. (1997) Meth Enzymol 289: Solid-Phase Peptide Synthesis. ISBN: 0121821900.

[1416] Chan & White (2000) Fmoc Solid Phase Peptide Synthesis. ISBN: 0199637245.

[1417] Kullmann (1987) Enzymatic Peptide Synthesis. ISBN: 0849368413.

[1418] Ibba (1996) Biotechnol Genet Eng Rev 13:197-216.

[1419] Hoskins et al. (2001) J. Bacteriol. 183:5709-5717.

[1420] GenBank NC_{—}004512.

[1421] GenBank NC_{—}003440.

[1422] GenBank NC_{—}003028.

[1423] Tettelin et al. (2001) Science 293:498-506.

[1424] WO02/077021.

[1425] Needleman & Wunsch (1970) J. Mol. Biol. 48, 443-453.

[1426] Rice et al. (2000) Trends Genet 16:276-277.

[1427] WO2011/119759

[1428] WO2011/027222.

[1429] WO2007/034917.

[1430] WO2007/034173.

[1431] WO2008/114817.

[1432] US2009-0105212.

[1433] US2009-0118263.

[1434] US2009-0143400.

[1435] US2009-0192153.

[1436] WO2007/093901.

[1437] WO2009/019553.

[1438] US2009/0221631.

[1439] WO2008/004948.

[1440] WO2008/135791.

[1441] US2009/0099216.

[1442] US2009/0202484.

[1443] WO 2013/131983 PCT/EP2013/054545

[1444] WO2008/101867.

[1445] WO2010/077613.

[1446] US2010/0143301.

[1447] Remington: The Science and Practice of Pharmacy (Gennaro, 2000; 20th edition, ISBN: 0683306472)

[1448] Talaga (2002) Vaccine 20:2474-84.

[1449] WO2011/049677.

[1450] WO2010/140119

[1451] PCT/EP2011/071566

[1452] Harfouche et al. 2011. Infection and immunity Vol 80, no. 1, pp 451-160

The application's sequence listing, which the Patent Office published only in electronic form, follows.

SEQUENCE LISTING (340 sequences)

SEQ ID NO: 1 - protein, 1312 aa, Streptococcus pneumoniae
MKHEKQQRFSIRKYAVGAASVLIGFAFQAQTVAADGVTPTTTENQPTIHTVSDSPQSSENRTEETPKAELQPEAPKTVETETPATDKVASLPKTEEKPQEEVSSTPSDKAEVVTPTSAEKETANKKEEEASPKKEEAKEVDSKESNTDKTDKDKPAKKDEAKAEADKPETETGKERAATVNEKLAKKKIVSIDAGRKYFSPEQLKEIIDKAKHYGYTDLHLLVGNDGLRFMLDDMSITANGKTYASDDVKRAIEKGTNDYYNDPNGNHLTESQMTDLINYAKDKGIGLIPTVNSPGHMDAILNAMKELGIQNPNFSYFGKKSARTVDLDNEQAVAFTKALIDKYAAYFAKKTEIFNIGLDEYANDATDAKGWSVLQADKYYPNEGYPVKGYEKFIAYANDLARIVKSHGLKPMAFNDGIYYNSDTSFGSFDKDIIVSMWTGGWGGYDVASSKLLAEKGHQILNTNDAWCYVLGRNADGQGWYNLDQGLNGIKNTPITSVPKTEGADIPIIGGMVAAWADTPSARYSPSHLFKLMRHFANANAEYFAADYESAEQALNEVPKDLNRYTAESVAAVKEAEKAIRSLDSNLSRAQQDTIDQAIAKLQETVNNLTLTPEAQKEEEAKREVEKLAKNKVISIDAGRKYFTLDQLKRIVDKASELGYSDVHLLLGNDGLRFLLNDMTITANGKTYASDDVKKAIIEGTKAYYDDPNGTALTQAEVTELIEYAKSKDIGLIPAINSPGHMDAMLVAMEKLGIKNPQAHFDKVSKTTMDLKNEEAMNFVKALIGKYMDFFAGKTKIFNFGTDEYANDATSAQGWYYLKWYQLYGKFAEYANTLAAMAKERGLQPMAFNDGFYYEDKDDVQFDKDVLISYWSKGWWGYNLASPQYLASKGYKFLNTNGDWYYVIGNHKQDEAYPLSKAVENSGKVPFNQLASTKYPEVDLPTVGSMLSIWADRPSAEYKEEEIFELMTAFADHNKDYFRANYNALREELAKIPTNLEGYSKESLEALDAAKTALNYNLNRNKQAELDTLVANLKAALQGLKPAATHSGSLDENEVAANVETRPELITRTEEIPFEVIKKENPNLPAGQENIITAGVKGERTHYISVLTENGKTTETVLDSQVTKEVINQVVEVGSPVTHKGDESGLAPTTEVKPRLDIQEEEIPFTTVTRENPLLLKGKTQVITKGVNGHRSNFYSVSTSADGKEVKTLVNSVVAQEAVTQIVEVGTMVTHVGDENGQAAIAEEKPKLEIPSQPAPSTAPAEESKALPQDPAPVVTEKKLPETGTHDSAELVVAGLMSTLAAYGLTKRKED

SEQ ID NO: 2 - protein, 1078 aa, Streptococcus pneumoniae
MILQYVYWSVYMQTKTKKLIVSLSSLVLSGFLLNHYMTVGAEETTTNTIQQSQKEVQYQQRDTKNLVENGDFGQTEDGSSPWTGSKAQGWSAWVDQKNSSADASTRVIEAKDGAITISSPEKLRAAVHRMVPIEAKKKYKLRFKIKTDNKVGIAKVRIIEESGKDKRLWNSATTSGTKDWQTIEADYSPTLDVDKIKLELFYETGTGTVSFKDIELVEVADQPSEDSQTDKQLEEKIDLPIGKKHVFSLADYTYKVENPDVASVKNGILEPLKEGTTNVIVSKDGKEVKKIPLKILASVKDTYTDRLDDWNGIIAGNQYYDSKNEQMAKLNQELEGKVADSLSSISSQADRIYLWEKFSNYKTSANLTATYRKLEEMAKQVTNPSSRYYQDETVVRTVRDSMEWMHKHVYNSEKSIVGNWWDYEIGTPRAINNTLSLMKEYFSDEEIKKYTDVIEKFVPDPEHFRKTTDNPFKALGGNLVDMGRVKVIAGLLRKDDQEISSTIRSIEQVFKLVDQGEGFYQDGSYIDHTNVAYTGAYGNVLIDGLSQLLPVIQKTKNPIDKDKMQTMYHWIDKSFAPLLVNGELMDMSRGRSISRANSEGHVAAVEVLRGIHRIADMSEGETKQRLQSLVKTIVQSDSYYDVFKNLKTYKDISLMQSLLSDAGVASVPRTSYLSAFNKMDKTAMYNAEKGFGFGLSLFSSRTLNYEHMNKENKRGWYTSDGMFYLYNGDLSHYSDGYWPTVNPYKMPGTTETDAKRADSDTGKVLPSAFVGTSKLDDANATATMDFTNWNQTLTAHKSWFMLKDKIAFLGSNIQNTSTDTAATTIDQRKLESSNPYKVYVNDKEASLTEQEKDYPETQSVFLESSDSKKNIGYFFFKKSSISMSKALQKGAWKDINEGQSDKEVENEFLTISQAHKQNGDSYGYMLIPNVDRATFNQMIKELESSLIENNETLQSVYDAKQGVWGIVKYDDSVSTISNQFQVLKRGVYTIRKEGDEYKIAYYNPETQESAPDQEVFKKLEQAAQPQVQNSKEKEKSEEEKNHSDQKNLPQTGEGQSILASLGFLLLGAFYLFRRGKNN

SEQ ID NO: 3 - protein, 2228 aa, Streptococcus pneumoniae
MGKGHWNRKRVYSIRKFAVGACSVMIGTCAVLLGGNIAGESVVYADETLITHTAEKPKEEKMIVEEKADKALETKNVVERTEQSEPSSTEAIASEKKEDEAVTPKEEKVSAKPEEKAPRIESQASSQEKPLKEDAKAVTNEEVNQMIENRKVDFNQNWYFKLNANSKEAIKPDADVSTWKKLDLPYDWSIFNDFDHESPAQNEGGQLNGGEAWYRKTFKLDEKDLKKNVRLTFDGVYMDSQVYVNGQLVGHYPNGYNQFSYDITKYLYKDGRENVIAVHAVNKQPSSRWYSGSGIYRDVTLQVTDKVHVEKNGTTILTPKLEEQQHGKVETHVTSKIVNTDDKDHELVAEYQIVERGGHAVTGLVRTASRTLKAHESTSLDAILEVERPKLWTVLNDKPALYELITRVYRDGQLVDAKKDLFGYRYYHWTPNEGFSLNGERIKFHGVSLHHDHGALGAEENYKAEYRRLKQMKEMGVNSIRTTHNPASEQTLQIAAELGLLVQEEAFDTWYGGKKPYDYGRFFEKDATHPEARKGEKWSDFDLRTMVERGKNNPAIFMWSIGNEIGEANGDAHSLATVKRLVKVIKDVDKTRYVTMGADKFRFGNGSGGHEKIADELDAVGFNYSEDNYKALRAKHPKWLIYGSETSSATRTRGSYYRPERELKHSNGPERNYEQSDYGNDRVGWGKTATASWTFDRDNAGYAGQFIWTGTDYIGEPTPWHNQNQTPVKSSYFGIVDTAGIPKHDFYLYQSQWVSVKKKPMVHLLPHWNWENKELASKVADSEGKIPVRAYSNASSVELFLNGKSLGLKTFNKKQTSDGRTYQEGANANELYLEWKVAYQPGTLEAIARDESGKEIARDKITTAGKPAAVRLIKEDHAIAADGKDLTYIYYEIVDSQGNVVPTANNLVRFQLHGQGQLVGVDNGEQASRERYKAQADGSWIRKAFNGKGVAIVKSTEQAGKFTLTAHSDLLKSNQVTVFTGKKEGQEKTVLGTEVPKVQTIIGEAPEMPTTVPFVYSDGSRAERPVTWSLVDVSKPGIVTVKGMADGREVEARVEVIALKSELPVVKRIAPNTNLNSVDKSVSYVLTDGSVQEYEVDKWEIAEEDKAKLAIPGSRIQATGYLEGQPIHATLVVEEGNPAAPVVPTVTVGGEAVTGLTSRQPMQYRTLSYGAQLPEVTASAENADVTVLQASAANGMRASIFIQPKDGGPLQTYAIQFLEEAPKIAHLSLQVEKADSLKEDQTVKLSVRAHYQDGTQAVLPADKVTFSTSGEGEVAIRKGMLELHKPGAVTLNAEYEGAKGQVELTIQANTEKKIAQSIRPVNVVTDLHQEPSLPATVTVEYDKGFPKTHKVTWQAIPKEKLDSYQIFEVLGKVEGIDLEARAKVSVEGIVSVEEVSVTTPIAEAPQLPESVRTYDSNGHVSSAKVAWDAIRPEQYAKEGVFTVNGRLEGTQLTTKLHVRVSAQTEQGANISDQWTGSELPLAFASDSNPSDPVSNVNDKLISYNNQPANRWTNWNRSNPEASVGVLFGDSGILSKRSVDNLSVGFHEDHGVGAPKSYVIEYYVGKTVPTAPKNPSFVGNEDHVFNDSANWKPVTNLKAPAQLKAGEMNHFSFDKVETYAIRIRMVKADNKRGTSITEVQIFAKQVAAAKQGQTRIQVDGKDLANFNPDLTDYYLESVDGKVPAVTANVSNNGLATVVPSVREGEPVRVIAKAENGDILGEYRLHFTKDKNLLSHKPVAAVKQARLLQVGQALELPTKVPVYFTGKDGYETKDLTVEWEEVPAENLTKAGQFTVRGRVLGSNLVAEVTVRVTDKLGETLSDNPNYDENSNQAFASATNDIDKNSHDRVDYLNDGDHSENRRWTNWSPTPSSNPEVSAGVIFRENGKIVERTVAQAKLHFFADSGTDAPSKLVLERYVGPGFEVPTYYSNYQAYESGHPFNNPENWEAVPYRADKDIAAGDEINVTFKAVKAKVMRWRMERKADKSGVAMIEMTFLAPSELPQESTQSKILVDGKELADFAENRQDYQITYKGQRPKVSVEENNQVASTVVDSGEDSLPVLVRLVSESGKQVKEYRIQLTKEKPVSAVQEDLPKLEFVEKDLAYKTVEKKDSTLYLGETRVEQEGKVGKERIFTVINPDGSKEEKLREVVEVPTDRIVLVGTKPVAQEAKKPQVSEKADTKPIDSSEADQTNKAQLPNTGSAASQAAVAAGLALLGLSAGLVVTKGKKED

SEQ ID NO: 4 - protein, 247 aa, Streptococcus pneumoniae
MSQKNNKKKNKRKNLLTNILAGFLILLSLALIFNTQIRNIFIVWNTNKYQVSQVSKEKLEENQDTEGNFDFDSVKAISSEAVLTSQWDAQKLPVIGGIAIPELEMNLPIFKGLDNVNLFYGAGTMKREQVMGEGNYSLASHHIFGVDNANKMLFSPLDNAKNGMKIYLTDKNKVYTYEIREVKRVTPDRVDEVDDRDGVNEITLVTCEDLAATERIIVKGDLKETKDYSQTSDEILTAFNQPYKQFY

SEQ ID NO: 5 - protein, 202 aa, Streptococcus pneumoniae
MVPKTATSTETKTITRIIHYVDKVTNQNVKEDVVQPVTLSRTKTENKVTGVVTYGEWTTGNWDEVISGKIDKYKDPDIPTVESQEVTSDSSDKEITVRYDRLSTPEKPIPQPNPEHPSVPTPNPELPNQETPTPDKPTPEPGTPKTETPVNPDPEVPTYETGKREELPNTGTEANATLASAGIMTLLAGLGLGFFKKKEDEK

SEQ ID NO: 6 - protein, 128 aa, Streptococcus pneumoniae
MEKDMNLKREQEFVSQYHFDARNFEWENENGAPETKVDVNFQLLQHDQENQVTSLIVILSFMIVFDKFVISGTISQVNHIDGRIVNEPNELNQEEVETLARPCLNMLNRLTYEVTEIALDLPGINLEF

SEQ ID NO: 7 - protein, 259 aa, Streptococcus pneumoniae
MKKNSLYIISSLFFACVLFVYATATNFQNSTSARQVKTETYTNTVTNVPIDIRYNSDKYFISGFASEVSVVLTGANRLSLASEMQESTRKFKVTADLTDAGVGTIEVPLSIEDLPNGLTAVATPQKITVKIGKKAQKDKVKIVPEIDPSQIDSRVQIENVMVSDKEVSITSDQETLDRIDKIIAVLPTSERITGNYSGSVPLQAIDRNGVVLPAVITPFDTIMKVTTKPVAPSSSTSNSSTSSSSETSSSTKATSSKTN

SEQ ID NO: 8 - protein, 721 aa, Streptococcus pneumoniae
MNLGEFWYNKINKNRGRRLMKKVRFIFLALLFFLASPEGAMASDGTWQGKQYLKEDGSQAANEWVFDTHYQSWFYIKADANYAENEWLKQGDDYFYLKSGGYMAKSEWVEDKGAFYYLDQDGKMKRNAWVGTSYVGATGAKVIEDWVYDSQYDAWFYIKADGQHAEKEWLQIKGKDYYFKSGGYLLTSQWINQAYVNASGAKVQQGWLFDKQYQSWFYIKENGNYADKEWIFENGHYYYLKSGGYMAANEWIWDKESWFYLKFDGKIAEKEWVYDSHSQAWYYFKSGGYMAANEWIWDKESWFYLKFDGKMAEKEWVYDSHSQAWYYFKSGGYMTANEWIWDKESWFYLKSDGKIAEKEWVYDSHSQAWYYFKSGGYMTANEWIWDKESWFYLKSDGKMAEKEWVYDSHSQAWYYFKSGGYMAKNETVDGYQLGSDGKWLGGKATNKNAAYYQVVPVTANVYDSDGEKLSYISQGSVVWLDKDRKSDDKRLAITISGLSGYMKTEDLQALDASKDFIPYYESDGHRFYHYVAQNASIPVASHLSDMEVGKKYYSADGLHFDGFKLENPFLFKDLTEATNYSAEELDKVFSLLNINNSLLENKGATFKEAEEHYHINALYLLAHSALESNWGRSKIAKDKNNFFGITAYDTTPYLSAKTFDDVDKGILGATKWIKENYIDRGRTFLGNKASGMNVEYASDPYWGEKIASVMMKINEKLGGKD

SEQ ID NO: 9 - protein, 501 aa, Streptococcus pneumoniae
MSVTFFIGEERLKIKIGLASICLLGLATSHVAANETEVAKTSQDTTTASSSSEQNQSSNKTQTSAEVQTNAAAYWDGDYYVKDDGSKAQSEWIFDNYYKAWFYINSDGRYSQNEWHGNYYLKSGGYMAQNEWIYDSNYKSWFYLKSDGAYAHQEWQLIGNKWYYFKKWGYMAKSQWQGSYFLNGQGAMIQNEWLYDPAYSAYFYLKSDGTYANQEWQKVGGKWYYFKKWGYMARNEWQGNYYLTGSGAMATDEVIMDGARYIFAASGELKEKKDLNVGWVHRDGKRYFFNNREEQVGTEHAKKIIDISEHNGRINDWKKVIDENKVDGVIVRLGYSGKEDKELAHNIKELNRLGIPYGVYLYTYAENETDAENDAKQTIELIKKYNMNLSYPIYYDVENWEYVNKSKRAPSDTDTWVKIINKYMDTMKQAGYQNVYVYSYRSLLQTRLKHPDILKHVNWVAAYTNALEWENPYYSGEKGWQYTSSEYMKGIQGRVDVSVWY

SEQ ID NO: 10 - protein, 471 aa, Streptococcus pneumoniae
MANKAVNDFILAMNYDKKKLLTHQGESIENRFIKEGNQLPDEFVVIERKKRSLSTNTSDISVTATNDSRLYPGALLVVDETLLENNPTLLAVDRAPMTYSIDLPGLASSDSFLQVEDPSNSSVRGAVNDLLAKWHQDYGQVNNVPARMQYEKITAHSMEQLKVKFGSDFEKTGNSLDIDFNSVHSGEKQIQIVNFKQIYYTVSVDAVKNPGDVFQDTVTVEDLKQRGISAERPLVYISSVAYGRQVYLKLETTSKSDEVEAAFEALIKGVKVAPQTEWKQILDNTEVKAVILGGDPSSGARVVTGKVDMVEDLIQEGSRFTADHPGLPISYTTSFLRDNVVATFQNSTDYVETKVTAYRNGDLLLDHSGAYVAQYYITWDELSYDHQGKEVLTPKAWDRNGQDLTAHFTTSIPLKGNVRNLSVKIRECTGLAWEWWRTVYEKTDLPLVRKRTISIWGTTLYPQVEDKVEND

SEQ ID NO: 11 - protein, 392 aa, Streptococcus pneumoniae
MKKKILASLLLSTVMVSQVAVLTTAHAETTDDKIAAQDNKISNLTAQQQEAQKQVDQIQEQVSAIQAEQSNLQAENDRLQAESKKLEGEITELSKNIVSRNQSLEKQARSAQTNGAVTSYINTIVNSKSITEAISRVAAMSEIVSANNKMLEQQKADKKAISEKQVANNDAINTVIANQQKLADDAQALTTKQAELKAAELSLAAEKATAEGEKASLLEQKAAAEAEARAAAVAEAAYKEKRASQQQSVLASANTNLTAQVQAVSESAAAPVRAKVRPTYSTNASSYPIGECTWGVKTLAPWAGDYWGNGAQWATSAAAAGFRTGSTPQVGAIACWNDGGYGHVAVVTAVESTTRIQVSESNYAGNRTIGNHRGWFNPTTTSEGFVTYIYAD

SEQ ID NO: 12 - protein, 167 aa, Streptococcus pneumoniae
MKSITKKIKATLAGVAALFAVFAPSFVSAQESSTYTVKEGDTLSEIAETHNTTVEKLAENNHIDNIHLIYVDQELVIDGPVAPVATPAPATYAAPAAQDETVSAPVAETPVVSETVVSTVSGSEAEAKEWIAQKESGGSYTATNGRYIGRYGSWTAAKNFWLNNGWY

SEQ ID NO: 13 - protein, 225 aa, Streptococcus pneumoniae
MTYLDAFKSGTLVLPSALLLHFKELFPSSDDFLVWQFFYLQNTTGLEEMSPSQIAERIGKEISDVNQSISNLTERGLLQYRTIELNGEIELLFDASLALERLDDLFGAVHSSSDQLTSQNQLKDLVETFQQELGRLLTPFEIEDLTKTLKEDGTSADLIKEALREAVLNGKPNWKYIQAILRNWRHEGIKSVAQIEAKRAEREASNPQLTQVSADFRNAMDLWKD

SEQ ID NO: 14 - protein, 659 aa, Streptococcus pneumoniae
MKKNRVFATAGLVLLAAGVLAACSSSKSSDSSAPKAYGYVYTADPETLDYLISRKNSTTVVTSNGIDGLFTNDNYGNLAPAVAEDWEVSKDGLTYTYKIRKGVKWFTSDGEEYAEVTAKDFVNGLKHAADKKSEAMYLAENSVKGLADYLSGTSTDFSTVGVKAVDDYTLQYTLNQPEPFWNSKLTYSIFWPLNEEFETSKGSDFAKPTDPTSLLYNGPFLLKGLTAKSSVEFVKNEQYWDKENVHLDTINLAYYDGSDQESLERNFTSGAYSYARLYPTSSNYSKVAEEYKDNIYYTQSGSGIAGLGVNIDRQSYNYTSKTTDSEKVATKKALLNKDFRQALNFALDRSAYSAQINGKDGAALAVRNLFVKPDFVSAGEKTFGDLVAAQLPAYGDEWKGVNLADGQDGLFNADKAKAEFAKAKKALEADGVQFPIHLDVPVDQASKNYISRIQSFKQSVETVLGVENVVVDIQQMTSDEFLNITYYAANASSEDWDVSGGVSWGPDYQDPSTYLDILKTTSSETTKTYLGFDNPNSPSVVQVGLKEYDKLVDEAAKETSDLNVRYEKYAAAQAWLTDSSLFIPAMASSGAAPVLSRIVPFTGASAQTGSKGSDVYFKYLKLQDKAVTKEEYEKAREKWLKEKAESNEKAQKELASHVK

SEQ ID NO: 15 - protein, 701 aa, Streptococcus pneumoniae
MFASKSERKVHYSIRKFSIGVASVAVASLVMGSVVHATENEGSTQAATSSNMAKTEHRKAAKQVVDEYIEKMLREIQLDRRKHTQNVALNIKLSAIKTKYLRELNVLEEKSKDELPSEIKAKLDAAFEKFKKDTLKPGEKVAEAKKKVEEAKKKAEDQKEEDRRNYPTNTYKTLELEIAEFDVKVKEAELELVKEEAKESRNEGTIKQAKEKVESKKAEATRLENIKTDRKKAEEEAKRKADAKLKEANVATSDQGKPKGRAKRGVPGELATPDKKENDAKSSDSSVGEETLPSSSLKSGKKVAEAEKKVEEAEKKAKDQKEEDRRNYPTNTYKTLDLEIAESDVKVKEAELELVKEEAKEPRDEEKIKQAKAKVESKKAEATRLENIKTDRKKAEEEAKRKAAEEDKVKEKPAEQPQPAPATQPEKPAPKPEKPAEQPKAEKTDDQQAEEDYARRSEEEYNRLTQQQPPKTEKPAQPSTPKTGWKQENGMWYFYNTDGSMATGWLQNNGSWYYLNANGAMATGWLQNNGSWYYLNANGSMATGWLQNNGSWYYLNANGAMATGWLQYNGSWYYLNSNGAMATGWLQYNGSWYYLNANGDMATGWLQNNGSWYYLNANGDMATGWLQYNGSWYYLNANGDMATGWVKDGDTWYYLEASGAMKASQWFKVSDKWYYVNGSGALAVNTTVDGYGVNANGEWVN

SEQ ID NO: 16 - protein, 196 aa, Streptococcus pneumoniae
MIPVVIEQTSRGERSYDIYSRLLKDRIIMLTGPVEDNMANSVIAQLLFLDAQDSTKDIYLYVNTPGGSVSAGLAIVDTMNFIKADVQTIVMGMAASMGTVIASSGAKGKRFMLPNAEYMIHQPMGGTGGGTQQTDMAIAAEHLLKTRNTLEKILAENSGQSMEKVHADAERDNWMSAQETLEYGFIDEIMANNSLN

SEQ ID NO: 17 - protein, 318 aa, Streptococcus pneumoniae
MEINVSKLRTDLPQVGVQPYRQVHAHSTGNPHSTVQNEADYHWRKDPELGFFSHIVGNGCIMQVGPVDNGAWDVGGGWNAETYAAVELIESHSTKEEFMTDYRLYIELLRNLADEAGLPKTLDTGSLAGIKTHEYCTNNQPNNHSDHVDPYPYLAKWGISREQFKHDIENGLTIETGWQKNDTGYWYVHSDGSYPKDKFEKINGTWYYFDSSGYMLADRWRKHTDGNWYWFDNSGEMATGWKKIADKWYYFNEEGAMKTGWVKYKDTWYYLDAKEGAMVSNAFIQSADGTGWYYLKPDGTLADRPEFTVEPDGLITVK

SEQ ID NO: 18 - protein, 828 aa, Streptococcus pneumoniae
MQLEISNRKRVSMKINKKYLVGSAAALILSVCSYELGLYQARTVKENNRVSYIDGKQATQKTENLTPDEVSKREGINAEQIVIKITDQGYVTSHGDHYHYYNGKVPYDAIFSEELLMKDPNYKLKDEDIVNEVKGGYVIKVDGKYYVYLKDAAHADNVRTKEEINRQKQEHSQHREGGTPRNDGAVALARSQGRYTTDDGYIFNASDIIEDTGDAYIVPHGDHYHYIPKNELSASELAAAEAFLSGRGNLSNSRTYRRQNSDNTSRTNWVPSVSNPGTTNTNTSNNSNTNSQASQSNDIDSLLKQLYKLPLSQRHVESDGLVFDPAQITSRTARGVAVPHGDHYHFIPYSQMSELEERIARIIPLRYRSNHWVPDSRPEQPSPQPTPEPSPGPQPAPNLKIDSNSSLVSQLVRKVGEGYVFEEKGISRYVFAKDLPSETVKNLESKLSKQESVSHTLTAKKENVAPRDQEFYDKAYNLLTEAHKALFENKGRNSDFQALDKLLERLNDESTNKEKLVDDLLAFLAPITHPERLGKPNSQIEYTEDEVRIAQLADKYTTSDGYIFDEHDIISDEGDAYVTPHMGHSHWIGKDSLSDKEKVAAQAYTKEKGILPPSPDADVKANPTGDSAAAIYNRVKGEKRIPLVRLPYMVEHTVEVKNGNLIIPHKDHYHNIKFAWFDDHTYKAPNGYTLEDLFATIKYYVEHPDERPHSNDGWGNASEHVLGKKDHSEDPNKNFKADEEPVEETPAEPEVPQVETEKVEAQLKEAEVLLAKVTDSSLKANATETLAGLRNNLTLQIMDNNSIMAEAEKLLALLKGSNPSSVSKEKIN

SEQ ID NO: 19 - protein, 819 aa, Streptococcus pneumoniae
  MOD_RES (578)..(578): Any amino acid
MKINKKYLAGSVAVLALSVCSYELGRYQAGQDKKESNRVAYIDGDQAGQKAENLTPDEVSKREGINAEQIVIKITDQGYVTSHGDHYHYYNGKVPYDAIISEELLMKDPNYQLKDSDIVNEIKGGYVIKVNGKYYVYLKDAAHADNIRTKEEIKRQKQERSHNHNSRADNAVAAARAQGRYTTDDGYIFNASDIIEDTGDAYIVPHGDHYHYIPKNELSASELAAAEAYWNGKQGSRPSSSSSYNANPAQPRLSENHNLTVTPTYHQNQGENISSLLRELYAKPLSERHVESDGLIFDPAQITSRTARGVAVPHGNHYHFIPYEQMSELEKRIARIIPLRYRSNHWVPDSRPEEPSPQPTPEPSPSPQPAPSNPIDGKLVKEAVRKVGDGYVFEENGVSRYIPAKDLSAETAAGIDSKLAKQESLSHKLGTKKTDLPSSDREFYNKAYDLLARIHQDLLDNKGRQVDFEALDNLLERLKDVSSDKVKLVEDILAFLAPIRHPERLGKPNAQITYTDDEIQVAKLAGKYTAEDGYIFDPRDITSDEGDAYVTPHMTHSHWIKKDSLSEAERAAAQAYAXEKGLTPPSTDHQDSGNTEAKGAEAIYNRVKAAKKVPLDRMPYNLQYTVEVKNGSLIIPHYDHYHNIKFEWFDEGLYEAPKGYTLEDLLATVKYYVEHPNERPHSDNGFGNASDHVQRNKNGQADTNQTEKPSEEKPQTEKPEEETPREEKPQSEKPESPKPTEEPEESPEESEEPQVETEKVEEKLREAEDLLGKIQDPIIKSNAKETLTGLKNNLLFGTQDNNTIMAEAEKLLALLKESK

SEQ ID NO: 20 - protein, 853 aa, Streptococcus pneumoniae
MKINKKYLAGSVAVLALSVCSYELGRHQAGQVKKESNRVSYIDGDQAGQKAENLTPDEVSKREGINAEQIVIKITDQGYVTSHGDHYHYYNGKVPYDAIISEELLMKDPNYQLKDSDIVNEIKGGYVIKVDGKYYVYLKDAAHADNIRTKEEIKRQKQERSHNHNSRADNAVAAARAQGRYTTDDGYIFNASDIIEDTGDAYIVPHGDHYHYIPKSDLSASELAAAQAYWNGKQGSRPSSSSSHNANPAQPRLSENHNLTVTPTYHQNQGENISSLLRELYAKPLSERHVESDGLIFDPAQITSRTANGVAVPHGDHYHFIPYSQLSPLEEKLARIIPLRYRSNHWVPDSRPEQPSPQSTPEPSPSPQPAPNPQPAPSNPIDEKLVKEAVRKVGDGYVFEENGVPRYIPAKDLSAETAAGIDSKLAKQESLSHKLGAKKTDLPSSDREFYNKAYDLLARIHQDLLDNKGRQVDFEALDNLLERLKDVSSDKVKLVDDILAFLAPIRHPERLGKPNAQITYTDDEIQVAKLAGKYTTEDGYIFDPRDITSDEGDAYVTPHMTHSHWIKKDSLSEAERAAAQAYAKEKGLTPPSTDHQDSGNTEAKGAEAIYNRVKAAKKVPLDRMPYNLQYTVEVKNGSLIIPHYDHYHNIKFEWFDEGLYEAPKGYSLEDLLATVKYYVEHPNERPHSDNGFGNASDHVQRNKNGQADTNQTEKPNEEKPQTEKPEEDKEHDEVSEPTHPESDEKENHVGLNPSADNLYKPSTDTEETEEEAEDTTDEAEIPQVEHSVINAKIAEAEALLEKVTDSSIRQNAVETLTGLKSSLLLGTKDNNTISAEVDSLLALLKESQPTPIQ

SEQ ID NO: 21 - protein, 1039 aa, Streptococcus pneumoniae
MKFSKKYIAAGSAVIVSLSLCAYALNQHRSQENKDNNRVSYVDGSQSSQKSENLTPDQVSQKEGIQAEQIVIKITDQGYVTSHGDHYHYYNGKVPYDALFSEELLMKDPNYQLKDADIVNEVKGGYIIKVDGKYYVYLKDAAHADNVRTKDEINRQKQEHVKDNEKVNSNVAVARSQGRYTTNDGYVFNPADIIEDTGNAYIVPHGGHYHYIPKSDLSASELAAAKAHLAGKNMQPSQLSYSSTASDNNTQSVAKGSTSKPANKSENLQSLLKELYDSPSAQRYSESDGLVFDPAKIISRTPNGVAIPHGDHYHFIPYSKLSALEEKIARRVPISGTGSTVSTNAKPNEVVSSLGSLSSNPSSLTTSKELSSASDGYIFNPKDIVEETATAYIVRHGDHFHYIPKSNQIGQPTLPNNSLATPSPSLPINPGISHEKHEEDGYGFDANRIIAEDESGFIMSHGNHNHYFFKKDLTEEQIKAAQKHLEEVKTSHNGLDSLSSHEQDYPGNAKEMKDLDKKIEEKIAGIMKQYGVKRESIVVNKEKNAIIYPHGDHHHADPIDEHKPVGIGHSHSNYELFKPEEGVAKKEGNKVYTGEELTNVVNLLKNSTFNNQNFTLANGQKRVSFSFPPELEKKLGINMLVKLITPDGKVLEKVSGKVFGEGVGNIANFELDQPYLPGQTFKYTIASKDYPEVSYDGTFTVPTSLAYKMASQTIFYPFHAGDTYLRVNPQFAVPKGTDALVRVFDEFHGNAYLENNYKVGEIKLPIPKLNQGTTRTAGNKIPVTFMANAYLDNQSTYIVEVPILEKENQTDKPSILPQFKRNKAQENSKLDEKVEEPKTSEKVEKEKLSETGNSTSNSTLEEVPTVDPVQEKVAKFAESYGMKLENVLFNMDGTIELYLPSGEVIKKNMADFTGEAPQGNGENKPSENGKVSTGTVENQPTENKPADSLPEAPNEKPVKPENSTDNGMLNPEGNVGSDPMLDPALEEAPAVDPVQEKLEKFTASYGLGLDSVIFNMDGTIELRLPSGEVIKKNLSDLIA

SEQ ID NO: 22 - protein, 1876 aa, Streptococcus pneumoniae
MFKKDRFSIRKIKGVVGSVFLGSLLMAPSVVDAATYHYVNKEIISQEAKDLIQTGKPDRNEVVYGLVYQKDQLPQTGTEASVLTAFGLLTVGSLLLIYKRKKIASVFLVGTMGLVVLPSAGAVDPVATLALASREGVVEMEGYRYVGYLSGDILKTLGLDTVLEETSAKPGEVTVVEVETPQSTTNQEQARTENQVVETEEAPKEEAPKTEESPKEEPKSEVKPTDDTLPKVEEGKEDSAEPAPVEEVGGEVESKPEEKVAVKPESQPSDKPAEESKVEQAGEPVAPRKDEQAPVEPENQPEAPEEEKAVEETPKQEESTPDTKAEETVEPKEETKTAKGTQEEGKEGQAPVQEVNPEYKVTTGTVEKSTESELDFTTEVVPDDTKYVDEEVVERQGSKGVQVTKTTYETVEVVETDKVLSTTTEVKTPVVPKVVKKGTKPVETREEVIPFATKEQEDDTLKRGTRQVAQEGVNGKKQITETYKTIRGEKTNEAPTVEETVLQAPQDEIIKKGTKGLEKPTLQWANTEKDVLKKSATASYTLTKPAGVEIKSIKLALKDKDGQLVKEVTVAENNLNATLDKLKYYQGYTLSTTMVYDRGEGEETEKLEDKQIQLDLKKVEIKNIKETSLMNVDAEGNETDKSLLSEKPTDVSQLYLRVTTHDNKVTRLAVSSVEEVVVDGKTLYKVVAKAPDLVQRRADDTLSEEYVHYFEKQLPKVNNVYYNFNELVKDMQANPMGEFKLGADLNAVNVKPAGKAYVMAKFRGTLSSVENHQYTIHNLERPLFNEAEGATLKNFNLGNVNINMPWADKVAPIGNMFKKSTLENIKVVGSVTGNNDVTGAVNKLDEANMRNVAFIGKINSLGDKGWWSGGLVSESWRSNTDSVYFDGDIVGNNSKFGGLVAKVNHGSNQWDVKQKGRLTNSVVKGTMTLKNHGQSGGLVHENYDWGWVENNISMMKVNNGEIMYGSGSIDGDPYFGFDYFKNNYYVKDVATGESTYKRSKQIQSISQAEADAKIANMGITANTFAIQDPVVNKLNRIIDRDSEYKAIQDYQETRNLAYRNLEKLQPFYNKEWIVNQGNKLTDESNLVKKTVLSVTGMKSGQFVTDLSSVDKIMIHYADGTKEEFGVSAISDSRVKQVKEYNVDDLGVVYTPNMVDKNRDSLITKVKEKLSSVALDSAEVKSITNNPASLYLEESFAEVRETLDKLVKSLLENEDHQLNSDEVAEKALLKKVEDNKAKIILALTYLNRYYGIDYDGLNFKHLMMFKPDFYGKTPSILDFLIRIGSAEKNLKGDRSLEAYREVIGGTIGKGELNGLLGYNMRLFTKYTDLNDWFIHAAKNVYVSEPETTTEDFKDKRHRIYDGLNNDVHGRMILPLLNLKKAHIFVISTYNTIAFSSFEKYGKNTEEERNAYKAEIDRVAKAQQRYLDFWSRLALPKVRNQLLKSQNSVPTPVWDNQVYVGLGGANRMGYGDGGRVVTPVRELFGPTDRWHQINWNMGAMAKIYERPWKDDQVYFMVTNMMEPFGISAFTHETTHVNDRMAYYGGDWHREGTDLEAFAQGMLQTPDKSTTNGEYGALGINMAYERKNDGEQLYNYDPEKLDSREKIDSYMKNYNESMMMLDYLEASAVIRQNLSDNSKWFKKMDKEWRTNADRNRLIGEPHQWDKLRDLTEEEKKLPIDSIDKLVENNFVTLHGMPKNGRYRTEGFDSSYQPVNMMAGVFGGNTSKSTVGSISFKHNAFRMWGYYGYENGFIPYVSNKLKGAANKENKGLLGDDFIIKKVSKNQFQNLEEWKKHWYHEVYDKAQKGFVEIEVDGVKISTYAQLQSLFEEAVSKDLAGMDDKNIKNHYQYTENLKWKIYKQLLKNTDGFSSDLFTAPQA

SEQ ID NO: 23 - protein, 448 aa, Streptococcus pneumoniae
MKILPFIARGTSYYLKMSVKKLVPFLVVGLMLAAGDSVYAYSRGNGSIARGDDYPAYYKNGSQEIDQWRMYSRQCTSFVAFRLSNVNGFEIPAAYGNANEWGHRARREGYRVDNTPTIGSITWSTAGTYGHVAWVSNVMGDQIEIEEYNYGYTESYNKRVIKANTMTGFIHFKDLDSGSVGNSQSSASTGGTHYFKTKSAIKTEPLVSATVIDYYYPGEKVHYDQILEKDGYKWLSYTAYNGSYRYVQLEAVNKNPLGNSVLSSTGGTHYFKIKSAIKTEPLVSATVIDYYYPGEKVHYDQILEKDGYKWLSYTAYNGSRRYIQLEGVTSSQNYQNQSGNISSYGSNNSSTVGWKKINGSWYHFKSNGSKSTGWLKDGSSWYYLKLSGEMQTGWLKENGSWYYLGSSGAMKTGWYQVSGEWYYSYSSGALAINTTVDGYRVNSDGERV

SEQ ID NO: 24 - protein, 42 aa, Streptococcus pneumoniae
MLTDWQKVNGNWYYLNSNGAMVTGSQTIDGKVYNFASSGEWI

SEQ ID NO: 25 - protein, 204 aa, Streptococcus pneumoniae
MFKRIRRVLVLAVFLFAGYKAYRVHQDVKQVMTYQPMVREILSEQDTPANEELVLAMIYTETKGKEGDVMQSSESASGSTNTINDNASSIRQGIQTLTGNLYLAQKKGVDIWTAVQAYNFGPAYIDFIAQNGKENTLALAKQYSRETVAPLLGNRTGKTYSYIHPISIFHGAELYVNGGNYYYSRQVRLNLYIIKCFTLFSTSG

SEQ ID NO: 26 - protein, 339 aa, Streptococcus pneumoniae
MVKKNDLFVDVSSHNGYDITGILEQMGTTNTIIKISESTTYLNPCLSAQVEQSNPIGFYHFARFGGDVAEAEREAQFFLDNVPMQVKYLVLDYEDDPSGDAQANTNACLRFMQMIADAGYKPIYYSYKPFTHDNVDYQQILAQFPNSLWIAGYGLNDGTANFEYFPSMDGIRWWQYSSNPFDKNIVLLDDEEDDKPKTAGTWKQDSKGWWFRRNNGSFPYNKWEKIGGVWYYFDSKGYCLTSEWLKDNEKWYYLKDNGAMATGWVLVGSEWYYMDDSGAMVTGWVKYKNNWYYMTNERGNMVSNEFIKSGKGWYFMNTNGELADNPSFTKEPDGLITVA

SEQ ID NO: 27 - protein, 612 aa, Streptococcus pneumoniae
MFAFKKRRKVHYSIRKFSIGVASVAVASLFMGSVVHATEKEVTTQVATSSNKANKSQTEHMKAAKQVDEYIEKMLSEIQLDRRKHTQNVGLLTKLGAIKTEYLRGLSVSKEKSTAELPSEIKEKLTAAFEQFKKDTLKSGKKVAEAQKKAKDQKEAKQEIEALIVKHKGREIDLDRKKAKAAVTEHLKKLLNDIEKNLKKEQHTHTVELIKNLKDIEKTYLHKLDESTQKAQLQKLIAESQSKLDEAFSKFKNGLSSSSNSGSSTKPETPQPETPKPEVKPELETPKPEVKPEPETPKPEVKPEPETPKPEVKPELETPKPEVKPEPETPKPEVKPEPETPKPEVKPEPETPKPEVKPELETPKPEVKPELETPKPEVKPEPETPKPEVKPELETPKPEVKPEPETPKPEVKPELETPKPEVKPEPETPKPEVKPELETPKPEVKPEPETPKPEVKPEPETPKPEVKPEPETPKPEVKPELETPKQKVKPEPETPKPEVKPEPETPKPEVKPELETPKPEVKPELEIPKPEVKPDNSKPQADDKKPSTPNNLSKDKQSSNQASTNENKKQGPATNKPKKSLPSTGSISNLALEIAGLLTLAGATILAKKRMK

SEQ ID NO: 28 - protein, 313 aa, Streptococcus pneumoniae
MKKKLLAGAITLLSVATLAACSKGSEGADLISMKGDVITEHQFYEQVKNNPSAQQVLLNMTIQKVFEKQYGSELDDKEVDDTIAEEKKQYGENYQRVLSQAGMTLETRKAQIRTSKLVELAVKKVAEAELTDEAYKKAFDEYTPDVTAQIIRLNNEDKAKEVLEKAKAEGADFAQLAKDNSTDEKTKENGGEITFDSASTEVPEQVKKAAFALDVDGVSDVITATGTQAYSSQYYIVKLTKKTEKSSNIDDYKEKLKTVILTQKQNDSTFVQSIIGKELQAANIKVKDQAFQNIFTQYIGGGDSSSSSSTSNE

SEQ ID NO: 29 - protein, 619 aa, Streptococcus pneumoniae
MNKKKMILTSLASVAILGAGFVASQPTVVRAEESPVASQSKAEKDYDAAKKDAKNAKKAVEDAQKALDDAKAAQKKYDEDQKKTEEKAALEKAASEEMDKAVAAVQQAYLAYQQATDKAAKDAADKMIDEAKKREEEAKTKFNTVRAMVVPEPEQLAETKKKSEEAKQKAPELTKKLEEAKAKLEEAEKKATEAKQKVDAEEVAPQAKIAELENQVHRLEQELKEIDESESEDYAKEGFRAPLQSKLDAKKAKLSKLEELSDKIDELDAEIAKLEDQLKAAEENNNVEDYFKEGLEKTIAAKKAELEKTEADLKKAVNEPEKPAPAPETPAPEAPAEQPKPAPAPQPAPAPKPEKPAEQPKPEKTDDQQAEEDYARRSEEEYNRLTQQQPPKAEKPAPAPKTGWKQENGMWYFYNTDGSMATGWLQNNGSWYYLNSNGAMATGWLQYNGSWYYLNANGAMATGWAKVNGSWYYLNANGAMATGWLQYNGSWYYLNANGAMATGWAKVNGSWYYLNANGAMATGWLQYNGSWYYLNANGAMATGWAKVNGSWYYLNANGAMATGWVKDGDTWYYLEASGAMKASQWFKVSDKWYYVNGLGALAVNTTVDGYKVNANGEWV

SEQ ID NO: 30 - protein, 309 aa, Streptococcus pneumoniae
MKKLGTLLVLFLSAIILVACASGKKDTTSGQKLKVVATNSIIADITKNIAGDKIDLHSIVPIGQDPHEYEPLPEDVKKTSEADLIFYNGINLETGGNAWFTKLVENAKKTENKDYFAVSDGVDVIYLEGQNEKGKEDPHAWLNLENGIIFAKNIAKQLSAKDPNNKEFYEKNLKEYTDKLDKLDKESKDKFNKIPAEKKLIVTSEGAFKYFSKAYGVPSAYIWEINTEEEGTPEQIKTLVEKLRQTKVPSLFVESSVDDRPMKTVSQDTNIPIYAQIFTDSIAEQGKEGDSYYSMMKYNLDKIAEGLAK

SEQ ID NO: 31 - protein, 2144 aa, Streptococcus pneumoniae
MKKSTVLSLTTAAVILAAYAPNEVVLADTSSSEDALSISDKEKVVVDKETENKEKHKDIHNAIETSKDTEEKKTTIIEEKEVVSKNPVIDTKTSNEEAKIKEENSNQSQGDHTDSFVNKNTENPKKEDKVVYIAEFKDKESGEKAIKGLSNLKNTKVLYTYDRIFNGSAIETTPDNLDKIKQIEGISSIERAQKVQPMMNHARKEIGVEEAIDYLKSINAPFGKNFDGRGMVISNIDTGTDYRHKAMRIDDDAKASMRFKKEDLKGTDKNYWLSDKIPHAFNYYNGGKITVEKYDDGRDYFDPHGMHIAGILAGNDTEQDIKNFNGIDGIAPNAQIFSYKMYSDAGSGFAGDETMFHAIEDSIKHNVDVVSVSSGFTGTGLVGEKYWQAIRALRKAGIPMVVATGNYATSASSSSWDLVANNHLKMTDTGNVTRTAAHEDAIAVASAKNQTVEFDKVNIGGESFKYRNIGAFFDKNKITTNEDGTKAPSKLKFVYIGKGQDQDLIGLDLRGKIAVMDRIYTKDLKNAFKKAMDKGARAIMVVNTVNYYNRDNWTELPAMGYEADEGTKSQVFSISGDDGVKLWNMINPDKKTEVKRNNKEDFKDKLEQYYPIDMESFNSNKPNVGDEKEIDFKFAPDTDKELYKEDIIVPAGSTSWGPRIDLLLKPDVSAPGKNIKSTLNVINGKSTYGYMSGTSMATPIVAASTVLIRPKLKEMLERPVLKNLKGDDKIDLTSLTKIALQNTARPMMDATSWKEKSQYFASPRQQGAGLINVANALRNEVVATFKNTDSKGLVNSYGSISLKEIKGDKKYFTIKLHNTSNRPLTFKVSASAITTDSLTDRLKLDETYKDEKSPDGKQIVPEIHPEKVKGANITFEHGTFTIGANSSFDLNAVINVGEAKNKNKFVESFIHFESVEEMEALNSNGKKINFQPSLSMPLMGFAGNWNHEPILDKWAWEEGSRSKTLGGYDDDGKPKIPGTLNKGIGGEHGIDKFNPAGVIQNRKDKNTTSLDQNPELFAFNNQGINAPSSSGSKIANIYPLDSNGNPQDAQLERGLTPSPLVLRSAEEGLISIVNTNKEGENQRDLKVISREHFIRGILNSKSNDAKGIKSSKLKVWGDLKWDGLIYNPRGREENAPESKDNQDPATKIRGQFEPIAEGQYFYKFKYRLTKDYPWQVSYIPVKIDNTAPKIVSVDFSNPEKIKLITKDTYHKVKDQYKNETLFARDQKEHPEKFDEIANEVWYAGAALVNEDGEVEKNLEVTYAGEGQGRNRKLDKDGNTIYEIKGAGDLRGKIIEVIALDGSSNFTKIHRIKFADQADEKGMISYYLVDPDKDASKYEKLGEISEDKLKNAKSPEENTNNNQAKDEDSKPDEKSSVEGEASLEINKTISTIREFENKDLKKLIKKKFREVNDFTSETGKRIEEYDYKYDDKGNIIAYDDGSALQYETEKFDEIKSKIYGVLSPSKDGHFEILGKISNVSKNAKVYYGNSYKSIEIKATKYDSHSKTMIFDLYANINDIVDGLAFAGDMRLFVKDDNQIKAETKIRMPEKNKETKAEYPYVSSYGNVIELGEGDLSKNKPDNLTKMESGKIYSDSEKQQYLLKDNIILRKGYALKVTTYNPGKTDMLEGNGVYSKEDIAKIQKANPNLRVLSETTIYADSRNVEDGRSTQAVLMSALDGFNIIRYQVFTFKMNDKGEAIDKDGNLVTDSSKLVLFGKDDKEYTGEDKSNVEAIKEDGSMLFIDTKPVNLSMDKNYFNPSKSNKIYVRNPEFYLRGKISDKGGFNWELRVNESVVDNYLIYGDLHIDNTRDFNIKLNVKDGDIMDWGMKDYKANGFPDKVTDMDGNVYLQTGYSDLNAKAVGVHYQFLYDNVKPEVNIDPKGNTSIEYADGKSVVFNINDKRNNGFDGEIQEQHIYVNGKEYTSFDDIKQITDKTLNIKIVVKDFARNTTVKEFILNKDTGEVSELKPHRVTVTIQNGKEMSSTIVSEEDFILPVYKGELEKGYQFDGWEISGFEGKKDAGYVINLSKDTFIKPVFKKIEEKKEEENKPTFDVSKKKDNPQVNHSQLNESHRKEDLQREDHSQKSDSTKDVTATVLDKNNISSKSTTNNPNKLPKTGTASGAQTLLAAGIMFIVGIFLGLKKKNQD

SEQ ID NO: 32 - protein, 324 aa, Streptococcus pneumoniae
MRKKLFLTSAAILWAVTAMNSVHAATDVQKVIDETYVQPEYVLGSSLSEDQKNQTLKKLGYNASTDTKELKTMTPDVYSKIMNVANDSSLQLYSSAKIQKLGDKSPLEVKIETPENITKVTQDMYRNAAVTLGVEHAKITVAAPIPVTGESALAGIYYSLEANGAKVPQANKDLAQEELKALSDINAENKDKSGYDANKLNVALADIKSGLAKAKESKGNLTEEDIRKIVEDTLKNYKLDQVITGNQINIIINFALNLSKSDILSNADFTKTLNDLKQSIVSQAGDSFKNINLNFDSDKALEDGGNFLSSLWQALVNFFKSFGS

SEQ ID NO: 33 - protein, 339 aa, Streptococcus pneumoniae
MHAKMRNKKQINLGIIFVICLGLLITIFLSLKLGTKEINIRDFLAAFGMGNTNDDFIKSIIYKRIPRTIFAILAGSSLAISGVLMQSVTRNPIADPGILGINTGASLSVVIGLSFLGISSSISHISFAIIGGLVSAIFVYAIAVSGKAGLTPIKLALSGTCVSMALSSFVSFLILPNNNVLDKFRFWQIGSLGAATLSSISTLLPFIILGHLIAIFISSDLNALAMGDEMAVGLGVNVNRIRSLAIIASVLLCSSITAIGGPIGFVGLIVPHFCGLFISKDIRTMTISSAFIGAELLLICDIIGRMLGKPGEIEVGIITAIIGGPVLIYVTMKNRGVNT

SEQ ID NO: 34 - protein, 321 aa, Streptococcus pneumoniae
MKTSLKLYFTALVASFLLLLGACSTNSSTSQTETSSSAPTEITIKSSLDEVKLSKVPEKIVTFDLGAADTIRALGFEKNIVGMPTKTVPTYLKDLVGTVKNVGSMKEPDLEAIAALEPDLIIASPRTQKFVDKFKEIAPTVLFQASKDDYWTSTKANIESLASAFGETSTQKAKEELAKLDKSIQEVATKNESSDKKALAILLNEGKMAAFGAKSRFSFLYQTLKFKPTDTKFEDSRHGQEVSFESVKEINPDILFVINRTLAIGGDNSSNDGVLENALIAETPAAKNGKIIQLTPDLWYLSGGGLESTKLMIEDIQKALK

SEQ ID NO: 35 - protein, 122 aa, Streptococcus pneumoniae
MSKNIVQLNNSFIQNEYQRRRYLMKERQKRNRFMGGVLILIMLLFILPTFNLAQSYQQLLQRRQQLADLQTQYQTLSDEKDKETAFATKLKDEDYAAKYTRAKYYYSKSREKVYTIPDLLQR

SEQ ID NO: 36 - protein, 877 aa, Streptococcus pneumoniae
MDKKKLLLIDGSSVAFRAFFALYQQLDRFKNVAGLHTNAIYGFQLMLSHLLERVEPSHILVAFDAGKTTFRTEMYADYKGGRAKTPDEFREQFPFIRELLDHMGIRHYDLAQYEADDIIGTLDKLAEQDGFDITIVSGDKDLIQLTDEHTVVEISKKGVAEFEAFTPDYLMEEMGLTPAQFIDLKALMGDKSDNIPGVTKVGEKTGIKLLLEHGSLEGIYENIDGMKTSKMKENLINDKEQAFLSKTLATIDTKAPIAIGLEDLVYSGPDVENLGKFYDEMGFKQLKQALNVSSADVSESLDFTIVDQISQDMLSEESIFHFELFGENYHTDNLVGFVWSCGDKLYATDKLELLQDPIFKDFLEKTSLRVYDFKKVKVLLQRFGVDLQAPAFDIRLAKYLLSTVEDNEIATIASLYGQTYLVDDETFYGKGVKKAIPEREKFLEHLACKLAVLVETEPILLEKLSENGQLELLYDMEQPLAFVLAKMEIAGIMVKKETLLEMQAENELVIEKLTQEIYELAGEEFNVNSPKQLGVLLFEKLGLPLEYTKKTKTGYSTAVDVLERLAPIAPIVKKILDYRQIAKIQSTYVIGLQDWILADGKIHTRYVQDLTQTGRLSSVDPNLQNIPARLEQGRLIRKAFVPEWEDSVLLSSDYSQIELRVLAHISKDEHLIKAFQEGADIHTSTAMRVFGIERPDDVTANDRRNAKAVNFGVVYGISDFGLSNNLGISRKEAKAYIDTYFERFPGIKNYMDEVVREARDKGYVETLFKRRRELPDINSRNFNIRGFAERTAINSPIQGSAADILKIAMIQLDKALVAGGYQTKMLLQVHDEIVLEVPKSELVEMKKLVKQTMEEAIQLSVPLIADENEGATWYEAK

SEQ ID NO: 37 - protein, 211 aa, Streptococcus pneumoniae
MGMAAFKNPNNQYKAITIAQTLGDDASSEELAGRYGSAVQCTEVTASNLSTVKTKATVVEKPLKDFRASTSDQSGWVESNGKWYFYESGDVKTGWVKTDGKWYYLNDLGVMQTGFVKFSGSWYYLSNSGAMFTGWGTDGSRWFYFDGSGAMKTGWYKENGTWYYLDEAGIMKTGWFKVGPHWYYAYGSGALAVSTTTPDGYRVNGNGEWVN

SEQ ID NO: 38 - protein, 1856 aa, Streptococcus pneumoniae
MSRKSIGEKRHSFSMRKLSVGLVSVTVSSFFLMSQGIQSVSADNMESPIHYKYMTEGKLTDEEKSLLVEALPQLAEESDDTYYLVYRSQQFLPNTGFNPTVGTFLFTAGLSLLVLLVSKRENGKKRLVHFLLLTSMGVQLLPASAFGLTSQILSAYNSQLSIGVGEHLPEPLKIEGYQYIGYIKTKKQDNTELSRTVDGKYSAQRDSQPNSTKTSDVVHSADLEWNQGQGKVSLQGEASGDDGLSEKSSIAADNLSSNDSFASQVEQNPDHKGESVVRPTVPEQGNPVSATTVQSAEEEVLATTNDRPEYKLPLETKGTQEPGHEGEAAVREDLPVYTKPLETKGTQGPGHEGEAAVREEEPAYTEPLATKGTQEPGHEGKATVREETLEYTEPVATKGTQEPEHEGEAAVEEELPALEVTTRNRTEIQNIPYTTEEIQDPTLLKNRRKIERQGQAGTRTIQYEDYIVNGNVVETKEVSRTEVAPVNEVVKVGTLVKVKPTVEITNLTKVENKKSITVSYNLIDTTSAYVSAKTQVFHGDKLVKEVDIENPAKEQVISGLDYYTPYTVKTHLTYNLGENNEENTETSTQDFQLEYKKIEIKDIDSVELYGKENDRYRRYLSLSEAPTDTAKYFVKVKSDRFKEMYLPVKSITENTDGTYKVTVAVDQLVEEGTDGYKDDYTFTVAKSKAEQPGVYTSFKQLVTAMQSNLSGVYTLASDMTADEVSLGDKQTSYLTGAFTGSLIGSDGTKSYAIYDLKKPLFDTLNGATVRDLDIKTVSADSKENVAALAKAANSANINNVAVEGKISGAKSVAGLVASATNTVIENSSFTGKLIANHQDSNKNDTGGIVGNITGNSSRVNKVRVDALISTNARNNNQTAGGIVGRLENGALISNSVATGEIRNGQGYSRVGGIVGSTWQNGRVNNVVSNVDVGDGYVITGDQYAAADVKNASTSVDNRKADRFATKLSKDQIDAKVADYGITVTLDDTGQDLKRNLREVDYTRLNKAEAERKVAYSNIEKLMPFYNKDLVVHYGNKVATTDKLYTTELLDVVPMKDDEVVTDINNKKNSINKVMLHFKDNTVEYLDVTFKENFINSQVIEYNVTGKEYIFTPEAFVSDYTAITNNVLSDLQNVTLNSEATKKVLGAANDAALDNLYLDRQFEEVKANIAEHLRKVLAMDKSINTTGDGVVEYVSEKIKNNKEAFMLGLTYMNRWYDINYGKMNTKDLSTYKFDFNGNNETSTLDTIVALGNSGLDNLRASNTVGLYANKLASVKGEDSVFDFVEAYRKLFLPNKTNNEWFKENTKAYIVEMKSDIAEVREKQESPTADRKYSLGVYDRISAPSWGHKSMLLPLLTLPEESVYISSNMSTLAFGSYERYRDSVDGVILSGDALRTYVRNRVDIAAKRHRDHYDIWYNLLDSASKEKLFRSVIVYDGFNVKDETGRTYWARLTDKNIGSIKEFFGPVGKWYEYNSSAGAYANGSLTHFVLDRLLDAYGTSVYTHEMVHNSDSAIYFEGNGRREGLGAELYALGLLQSVDSVNSHILALNTLYKAEKDDLNRLHTYNPVERFDSDEALQSYMHGSYDVMYTLDAMEAKAILAQNNDVKKKWFRKIENYYVRDTRHNKDTHAGNKVRPLTDEEVANLTSLNSLIDNDIINRRSYDDSREYKRNGYYTISMFSPVYAALSNSKGAPGDIMFRKIAYELLAEKGYHKGFLPYVSNQYGAEAFASGSKTFSSWHGRDVALVTDDLVFKKVFNGEYSSWADFKKAMFKQRIDKQDNLKPITIQYELGNPNSTKEVTITTAAQMQQLINEAAAKDITNIDRATSHTPASWVHLLKQKIYNAYLRTTDDFRNSIYK

SEQ ID NO: 39 - protein, 857 aa, Streptococcus pneumoniae
MKFNPNQRYTRWSIRRLSVGVASVVVASGFFVLVGQPSSVRADGLNPTPGQVLPEETSGTKEGDLSEKPGDTVLTQAKPEGVTGNTNSLPTPTERTEVSEETSPSSLDTLFEKDEEAQKNPELTDVLKETVDTADVDGTQASPAETTPEQVKGGVKENTKDSIDVPAAYLEKAEGKGPFTAGVNQVIPYELFAGDGMLTRLLLKASDNAPWSDNGTAKNPALPPLEGLTKGKYFYEVDLNGNTVGKQGQALIDQLRANGTQTYKATVKVYGNKDGKADLTNLVATKNVDININGLVAKETVQKAVADNVKDSIDVPAAYLEKAKGEGPFTAGVNHVIPYELFAGDGMLTRLLLKASDKAPWSDNGDAKNPALSPLGENVKTKGQYFYQVALDGNVAGKEKQALIDQFRANGTQTYSATVNVYGNKDGKPDLDNIVATKKVTININGLISKETVQKAVADNVKDSIDVPAAYLEKAKGEGPFTAGVNHVIPYELFAGDGMLTRLLLKASDKAPWSDNGDAKNPALSPLGENVKTKGQYFYQLALDGNVAGKEKQALIDQFRANGTQTYSATVNVYGNKDGKPDLDNIVATKKVTININGLISKETVQKAVADNVKDSIDVPAAYLEKAKGEGPFTAGVNHVIPYELFAGDGMLTRLLLKASDKAPWSDNGDAKNPALSPLGENVKTKGQYFYQVALDGNVAGKEKQALIDQFRANGTQTYSATVNVYGNKDGKPDLDNIVATKKVTIKINVKETSDTANGSLSPSNSGSGVTPMNHNHATGTTDSMPADTMTSSTNTMAGENMAASANKMSDTMMSEDKAMLPNTGETQTSMASIGFLGLALAGLLGGLGLKNKKEEN

SEQ ID NO: 40 - protein, 195 aa, Streptococcus pneumoniae
MKSITKKIKATLAGVAALFAVFAPSFVSAQESSTYTVKEGDTLSEIAETHNTTVEKLAENNHIDNIHLIYVDQELVIDGPVAPVATPAPATYAAPAAQDETVSAPVAETPVVSETVVSTVSGSEAEAKEWIAQKESGGSYTATNGRYIGRYQLTDSYLNGDYSAENQERVADAYVAGRYGSWTAAKNFWLNNGWY

SEQ ID NO: 41 - protein, 189 aa, Streptococcus pneumoniae
MKKIVLVSLAFLFVLVGCGQKKETGPATKTEKDTLQSALPVIENAEKNTVVTKTLVLPKSDDGSQQTQTITYKDKTFLSLAIQQKRPVSDELKTYIDQHGVEETQKALLEAEEKDKSIIEARKLAGFKLETKLLSATELQTTTSFDFQVLDVKKASQLEHLKNIGLENLLKNEPSKYISDRLANGATEQ

SEQ ID NO: 42 - protein, 416 aa, Streptococcus pneumoniae
MFEVEEWLHSRIGLNFRSGLGRMQQAVDLLGNPEQSYPIIHVTGTNGKGSTIAFMRELFMGHGKKVATFTSPHIVSINDRICINGQPIADADFIRLTDQVKEMEKTLLQTPAQLSFFELLTLVAFLYFREQEVDLVLLEVGIGGLLDTTNVVTGEFAVITSIGLDHQETLGDSLEAIAEQKAGIFKAGKKAVIAKLPPEARLACQKKAESLAVNLYQAGQDFLMLNGDFSSSLLNLSQLNIGLEGVYQQENAALALQTFLLFMRERKEAVDEQAVRKALEQTHWAGRLERIRPQIYLDGAHNLPALTRLAEFIKEKEQEGYRPQILFGSLKRKDYQGMLGYLTEKLPQVELKVTGFDYQGALDERDVTGYDIVSSYREFISDFEERADAQDLLFVTGSLYFISEVRGYLLDREQIN

SEQ ID NO: 43 - protein, 277 aa, Streptococcus pneumoniae
VGIRVYKPTTNGRRNMTSLDFAEITTSTPEKSLLVALKSKAGRNNNGRITVRHQGGGHKRFYRLVDFKRNKDNVEAVVKTIEYDPNRSANIALVHYTDGVKAYIIAPKGLEVGQRIVSGPEADIKVGNALPLANIPVGTLIHNIELKPGRGGELVRAAGASAQVLGSEGKYVLVRLQSGEVRMILGTCRATVGVVGNEQHGLVNLGKAGRSRWKGIRPTVRGSVMNPNDHPHGGGEGKAPVGRKAPSTPWGKPALGLKTRNKKAKSDKLIVRRRNEK

SEQ ID NO: 44 - protein, 89 aa, Streptococcus pneumoniae
MAKKSMVAREAKRQKIVDRYAEKRAALKAAGDYEGLSKLPRNASPTRLHNRCRVTGRPHSVYRKFGLSRIAFRELAHKGQIPGVTKASW

SEQ ID NO: 45 - protein, 445 aa, Streptococcus pneumoniae
MDIRQVTETIAMIEEQNFDIRTITMGISLLDCIDPDINRAAEKIYQKITTKAANLVAVGDEIAAELGIPIVNKRVSVTPISLIGAATDATDYVVLAKALDKAAKEIGVDFIGGFSALVQKGYQKGDEILINSIPRALAETDKVCSSVNIGSTKSGINMTAVADMGRIIKETANLSDMGVAKLVVFANAVEDNPFMAGAFHGVGEADVIINVGVSGPGVVKRALEKVRGQSFDVVAETVKKTAFKITRIGQLVGQMASERLGVEFGIVDLSLAPTPAVGDSVARVLEEMGLETVGTHGTTAALALLNDQVKKGGVMACNQVGGLSGAFIPVSEDEGMIAAVQNGSLNLEKLEAMTAICSVGLDMIAIPEDTPAETIAAMIADEAAIGVINMKTTAVRIIPKGKEGDMIEFGGLLGTAPVMKVNGASSVDFISRGGQIPAPIHSFKN

SEQ ID NO: 46 - protein, 812 aa, Streptococcus pneumoniae
MVNTEVARTTIKTEYFGSLTERMNKYREDVLNKKPYIDAERAVLATRAYERYKEQPNVLKRAYMLKEILENMTIYIEEESMIAGNQASSNKDAPIFPEYTLEFVLNELDLFEKRDGDVFYITEETKEQLRSIAPFWENNNLRARAGALLPEEVSVYMETGFFGMEGKMNSGDAHLAVNYQKLLQFGLRGFEERARKAKVALDLTDPASIDKYHFYDSIFIVIDAIKVYAKRFVALAKSLAENANPKRKKELLEIADICSRVPYEPATTFAEAIQSVWFIQCILQIESNGHSLSYGRFDQYMYPYMKADLESGKETEDSIVERLTNLWIKTITINKVRSQSHTFSSAGSPLYQNVTIGGQTRDKKDAVNPLSYLVLKSVAQTHLPQPNLTVRYHAGLDARFMNECIEVMKLGFGMPAFNNDEIIIPSFIAKGVLEDDAYDYSAIGCVETAVPGKWGYRCTGMSYMNFPKVLLITMNDGIDPASGKRFAPSFGRFKDMKNFSELENAWDKTLRYLTRMSVIVENSIDLSLEREVPDILCSALTDDCIGRGKHLKEGGAVYDYISGLQVGIANLSDSLAAIKKLVFEEERISPSQLWHALETDYAGEEGKVIQEMLIHDAPKYGNDDDYADKLVTAAYDIYVDEIAKYPNTRYGRGPIGGIRYSGTSSISANVGQGRGTLATPDGRNAGTPLAEGCSPSHNMDQHGPTSVLKSVSKLPTDEIVGGVLLNQKVNPQTLAKEEDKLKLIALLRTFFNRLHGYHIQYNVVSRETLIDAQKHPEKHRDLIVRVAGYSAFFNVLSKATQDDIIGRTEHTL

SEQ ID NO: 47 - protein, 130 aa, Streptococcus pneumoniae
MSQAQYAGTGRRKNAVARVRLVPGTGKITVNKKDVEEYIPHADLRLVINQPFAVTSTVGSYDVFVNVIGGGYAGQSGAIRHGIARALLQVDPDFRDSLKRAGLLTRDSRKVERKKPGLKKARKASQFSKR

SEQ ID NO: 48 - protein, 333 aa, Streptococcus pneumoniae
LEKKLTIKDIAEMAQTSKTTVSFYLNGKYEKMSQETREKIEKVIHETNYKPSIVARSLNSKRTKLIGVLIGDITNSFSNQIVKGIEDIASQNGYQVMIGNSNYSQESEDRYIESMLLLGVDGFIIQPTSNFRKYSRIIDEKKKKMVFFDSQLYEHRTSWVKTNNYDAVYDMTQSCIEKGYEHFLLITADTSRLSTRIERASGFVDALTDANMRHASLTIEDKHTNLEQIKEFLQKEIDPDEKTLVFIPNCWALPLVFTVIKELNYNLPQVGLIGFDNTEWTCFSSPSVSTLVQPSFEEGQQATKILIDQIEGRNQEERQQVLDCSVNWKESTF

SEQ ID NO: 49 - protein, 1767 aa, Streptococcus pneumoniae
MNKGLFEKRCKYSIRKFSLGVASVMIGAAFFGTSPVLADSVQSGSTANLPADLATALATAKENDGRDFEAPKVGEDQGSPEVTDGPKTEEELLALEKEKPAEEKPKEDKPAAAKPETPKTVTPEWQTVANKEQQGTVTIREEKGVRYNQLSSTAQNDNAGKPALFEKKGLTVDANGNATVDLTFKDDSEKGKSRFGVFLKFKDTKNNVFVGYDKDGWFWEYKSPTTSTWYRGSRVAAPETGSTNRLSITLKSDGQLNASNNDVNLFDTVTLPAAVNDHLKNEKKILLKAGSYDDERTVVSVKTDNQEGVKTEDTPAEKETGPEVDDSKVTYDTIQSKVLKAVIDQAFPRVKEYSLNGHTLPGQVQQFNQVFINNHRITPEVTYKKINETTAEYLMKLRDDAHLINAEMTVRLQVVDNQLHFDVTKIVNHNQVTPGQKIDDESKLLSSISFLGNALVSVSSNQTGAKFDGATMSNNTHVSGDDHIDVTNPMKDLAKGYMYGFVSTDKLAAGVWSNSQNSYGGGSNDWTRLTAYKETVGNANYVGIHSSEWQWEKAYKGIVFPEYTKELPSAKVVITEDANADKNVDWQDGAIAYRSIMNNPQGWEKVKDITAYRIAMNFGSQAQNPFLMTLDGIKKINLHTDGLGQGVLLKGYGSEGHDSGHLNYADIGKRIGGVEDFKTLIEKAKKYGAHLGIHVNASETYPESKYFNEKILRKNPDGSYSYGWNWLDQGINIDAAYDLAHGRLARWEDLKKKLGDGLDFIYVDVWGNGQSGDNGAWATHVLAKEINKQGWRFAIEWGHGGEYDSTFHHWAADLTYGGYTNKGINSAITRFIRNHQKDAWVGDYRSYGGAANYPLLGGYSMKDFEGWQGRSDYNGYVTNLFAHDVMTKYFQHFTVSKWENGTPVTMTDNGSTYKWTPEMRVELVDADNNKVVVTRKSNDVNSPQYRERTVTLNGRVIQDGSAYLTPWNWDANGKKLSTDKEKMYYFNTQAGATTWTLPSDWAKSKVYLYKLTDQGKTEEQELTVKDGKITLDLLANQPYVLYRSKQTNPEMSWSEGMHIYDQGFNSGTLKHWTISGDASKAEIVKSQGANDMLRIQGNKEKVSLTQKLTGLKPNTKYAVYVGVDNRSNAKASITVNTGEKEVTTYTNKSLALNYVKAYAHNTRRDNATVDDTSYFQNMYAFFTTGADVSNVTLTLSREAGDQATYFDEIRTFENNSSMYGDKHDTGKGTFKQDFENVAQGIFPFVVGGVEGVEDNRTHLSEKHNPYTQRGWNGKKVDDVIEGNWSLKTNGLVSRRNLVYQTIPQNFRFEAGKTYRVTFEYEAGSDNTYAFVVGKGEFQSGRRGTQASNLEMHELPNTWTDSKKAKKATFLVTGAETGDTWVGIYSTGNASNTRGDSGGNANFRGYNDFMMDNLQIEEITLTGKMLTENALKNYLPTVAMTNYTKESMDALKEAVFNLSQADDDISVEEARAEIAKIEALKNALVQKKTALVADDFASLTAPAQAQEGLANAFDGNVSSLWHTSWNGGDVGKPATMVLKEPTEITGLRYVPRGSGSNGNLRDVKLVVTDESGKEHTFTATDWPNNNKPKDIDFGKTIKAKKIVLTGTKTYGDGGDKYQSAAELIFTRPQVAETPLDLSGYEAALVKAQKLTDKDNQEEVASVQASMKYATDNHLLTERMVEYFADYLNQLKDSATKPDAPTVEKPEFKLRSLASEQGKTPDYKQEIARPETPEQILPATGESQSDTALILASVSLALSALFVVKTKKD

SEQ ID NO: 50 - protein, 719 aa, Streptococcus pneumoniae
MNKPTILRLIKYLSISFLSLVIAAIVLGGGVFFYYVSKAPSLSESKLVATTSSKIYDNKNQLIADLGSERRVNAQANDIPTDLVKAIVSIEDHRFFDHRGIDTIRILGAFLRNLQSNSLQGGSTLTQQLIKLTYFSTSTSDQTISRKAQEAWLAIQLEQKATKQEILTYYINKVYMSNGNYGMQTAAQNYYGKDLNNLSLPQLALLAGMPQAPNQYDPYSHPEAAQDRRNLVLSEMKNQGYISAEQYEKAVNTPITDGLQSLKSASNYPAYMDNYLKEVINQVEEETGYNLLTTGMDVYTNVDQEAQKHLWDIYNTDEYVAYPDDELQVASTIVDVSNGKVIAQLGARHQSSNVSFGINQAVETNRDWGSTMKPITDYAPALEYGVYDSTATIVHDEPYNYPGTNTPVYNWDRGYFGNITLQYALQQSRNVPAVETLNKVGLNRAKTFLNGLGIDYPSIHYSNAISSNTTESDKKYGASSEKMAAAYAAFANGGTYYKPMYIHKVVFSDGSEKEFSNVGTRAMKETTAYMMTDMMKTVLTYGTGRNAYLAWLPQAGKTGTSNYTDEEIENHIKTSQFVAPDELFAGYTRKYSMAVWTGYSNRLTPLVGNGLTVAAKVYRSMMTYLSEGSNPEDWNIPEGLYRNGEFVFKNGARSTWNSPAPQQPPSTESSSSSSDSSTSQSSSTTPSTNNSTTTNPNNNTQQSNTTPDQQNQNPQPAQP

SEQ ID NO: 51 - protein, 464 aa, Streptococcus pneumoniae
MSKKRRNRHKKEGQEPQFDFDEAKELTVGQAIRKNEEVESGVLPEDSILDKYVKQHRDEIEADKFATRQYKKEEFVETQSLDDLIQEMREAVEKSEASSEEVPSSEDILLPLPLDDEEQGLDPLLLDDENPTEMTEEVEEEQNLSRLDQEDSEKKSKKGFILTVLALVSVIICVSAYYVYRQVARSTKEIETSQSTTANQSDVDDFNTLYDAFYTDSNKTALKNSQFDKLSQLKTLLDKLEGSREHTLAKSKYDSLATQIKAIQDVNAQFEKPAIVDGVLDTNAKAKSDAKFTDIKTGNTELDKVLDKAISLGKSQQTSTSSSSSSQTSSSSSSQASSNTTSEPKPSSSNETRSSRSEVNMGLSSAGVAVQRSASRVAYNQSAIDDSNNSAWDFADGVLEQILATSRSRGYITGDQYILERVNIVNGNGYYNLYKPDGTYLFTLNCKTGYFVGNGAGHADDLDY

SEQ ID NO: 52 - protein, 340 aa, Streptococcus pneumoniae
MKLLKKMMQVALAVFFFGLLATNTVFANTTGGRFVDKDNRKYYVKDDHKAIYWHKIDGKTYYFGDIGEMVVGWQYLEIPGTGYRDNLFDNQPVNEIGLQEKWYYFGQDGALLEQTDKQVLEAKTSENTGKVYGEQYPLSAEKRTYYFDNNYAVKTGWIYEEGHWYYLNKLGNFGDDSYNPLPIGEVAKGWTQDFHVTIDIDRSKPAPWYYLDASGKMLTDWQKVNGKWYYFGSSGSMATGWKYVRGKWYYLDNKNGDMKTGWQYLGNKWYYLRSSGAMVTGWYQDGSTWYYLDPSNGDMKIGWTKVNGKWYYLNSNGAMVTGSQTIDGKVYNFASSGEWI

SEQ ID NO: 53 - protein, 332 aa, Streptococcus pneumoniae
MKILKKTMQVGLTVFFFGLLGTSTVFADDSEGWQFVQENGRTYYKKGDLKETYWRVIDGKYYYFDSLSGEMVVGWQYIPFPSKGSTIGPYPNGIRLEGFPKSEWYYFDKNGVLQEFVGWKTLEIKTKDSVGRKYGEKREDSEDKEEKRYYTNYYFNQNHSLETGWLYDQSNWYYLAKTEINGENYLGGERRAGWINDDSTWYYLDPTTGIMQTGWQYLGNKWYYLRSSGAMATGWYQEGTTWYYLDHPNGDMKTGWQNLGNKWYYLRSSGAMATGWYQDGSTWYYLNAGNGDMKTGWFQVNGNWYYAYSSGALAVNTTVDGYSVNYNGEWVR

SEQ ID NO: 54 - protein, 285 aa, Streptococcus pneumoniae
MVLSKYYGVADGMNVEGRGSANFIKDNVLITAAHNYYRHDYGKEADDIYVLPAVSPSQEPFGKIKVKEVRYLKEFRNLNSKDAREYDLALLILEEPIGAKLGTLGLPTSQKNLTGITVTITGYPSYNFKIHQMYTDKKQVLSDDGMFLDYQVDTLEGSSGSTVYDASHRVVGVHTLGDGANQINSAVKLNERNLPFIYSVLKGYSLEGWKKINGSWYHYRQHDKQTGWQEINDTWYYLDSSGKMLTDWQKVNGKWYYLNSNGAMVTGSQTIDGKVYNFASSGEWI

SEQ ID NO: 55 - protein, 630 aa, Streptococcus pneumoniae
LMKKTFFLLVLGLFCLLPLSVFAIDFKINSYQGDLYIHADNTAEFRQKIVYQFEEDFKGQIVGLGRAGKMPSGFDIDPHPKIQAAKNGAELADVTSEVTEEADGYTVRVYNPGQEGDIVEVDLVWNLKNLLFLYDDIAELNWQPLTDSSESIEKFEFHVRGDKGAEKLFFHTGKLFREGTIEKSNLDYTIRLDNLPAKRGVELHAYWPRTDFASARDQGLKGNRLEEFNKIEDSIVREKDQSKQLVTWVLPSILSISLLLSVCFYFIYRRKTTPSVKYAKNHRLYEPPMELEPMVLSEAVYSTSLEEVSPLVKGAGKFTFDQLIQATLLDVIDRGNVSIISEGDAVGLRLVKEDGLSSFEKDCLNLAFSGKKEETLSNLFADYKVSDSLYRRAKVSDEKRIQARGLQLKSSFEEVLNQMQEGVRKRVSFWGLPDYYRPLTGGEKALQVGMGALTILPLFIGFGLFLYSLDVHGYLYLPLPILGFLGLVLSVFYYWKLRLDNRDGVLNEAGAEVYYLWTSFENMLREIARLDQAELESIVVWNRLLVYATLFGYADKVSHLMKVHQIQVENPDINLYVAYGWHSTFYHSTAQMSHYASVANTASTYSVSSGSGSSGGGFSGGGGGGSIGAF

SEQ ID NO: 56 - protein, 665 aa, Streptococcus pneumoniae
MKSINKFLTMLAALLLTASSLFSAATVFAAGTTTTSVTVHKLLATDGDMDKIANELETGNYAGNKVGVLPANAKEIAGVMFVWTNTNNEIIDENGQTLGVNIDPQTFKLSGAMPATAMKKLTEAEGAKFNTANLPAAKYKIYEIHSLSTYVGEDGATLTGSKAVPIEIELPLNDVVDAHVYPKNTEAKPKIDKDFKGKANPDTPRVDKDTPVNHQVGDVVEYEIVTKIPALANYATANWSDRMTEGLAFNKGTVKVTVDDVALEAGDYALTEVATGFDLKLTDAGLAKVNDQNAEKTVKITYSATLNDKAIVEVPESNDVTFNYGNNPDHGNTPKPNKPNENGDLTLTKTWVDATGAPIPAGAEATFDLVNAQTGKVVQTVTLTTDKNTVTVNGLDKNTEYKFVERSIKGYSADYQEITTAGEIAVKNWKDENPKPLDPTEPKVVTYGKKFVKVNDKDNRLAGAEFVIANADNAGQYLARKADKVSQEEKQLVVTTKDALDRAVAAYNALTAQQQTQQEKEKVDKAQAAYNAAVIAANNAFEWVADKDNENVVKLVSDAQGRFEITGLLAGTYYLEETKQPAGYALLTSRQKFEVTATSYSATGQGIEYTAGSGKDDATKVVNKKITIPQTGGIGTIIFAVAGAAIMGIAVYAYVKNNKDEDQLA

SEQ ID NO: 57 - protein, 279 aa, Streptococcus pneumoniae
MAVMAYPLVSRLYYRVESNQQIADFDKEKATLDEADIDERMKLAQAFNDSLNNVVSGDPWSEEMKKKGRAEYARMLEIHERMGHVEIPVIDVDLPVYAGTAEEVLQQGAGHLEGTSLPIGGNSTHAVITAHTGLPTAKMFTDLTKLKVGDKFYVHNIKEVMAYQVDQVKVIEPTNFDDLLIVPGHDYVTLLTCTPYMINTHRLLVRGHRIPYVAEVEEEFIAANKLSHLYRYLFYVAVGLIVILLWIIRRLRKKKKQPEKALKALKAARKEVKVEDGQQ

SEQ ID NO: 58 - protein, 283 aa, Streptococcus pneumoniae
MSRTKLRALLGYLLMLVACLIPIYCFGQMVLQSLGQVKGHATFVKSMTTEMYQEQQNHSLAYNQRLASQNRIVDPFLAEGYEVNYQVSDDPDAVYGYLSIPSLEIMEPVYLGADYHHLGMGLAHVDGTPLPLDGTGIRSVIAGHRAEPSHVFFRHLDQLKVGDALYYDNGQEIVEYQMMDTEIILPSEWEKLESVSSKNIMTLITCDPIPTFNKRLLVNFERVAVYQKSDPQTAAVARVAFTKEGQSVSRVATSQWLYRGLVVLAFLGILFVLWKLARLLRGK

SEQ ID NO: 59 - protein, 1659 aa, Streptococcus pneumoniae
MKNPFFERRCRYSIRKLSVGACSLMIGAVLFAGPALAEETAVPENSGANTELVSGESEHSTNEADKQNEGEHARENKLEKAEGVAIASETASPASNEAATTETAEAASAAKPEEKASEVVAETPSAEAKPKSDKETEAKPEATNQGDESKPAAEANKTEKEVQPDVPKNTEKTLKPKEIKFNSWEELLKWEPGAREDDAINRGSVVLASRRTGHLVNEKASKEAKVQALSNTNSKAKDHASVGGEEFKAYAFDYWQYLDSMVFWEGLVPTPDVIDAGHRNGVPVYGTLFFNWSNSIADQERFAEALKQDADGSFPIARKLVDMAKYYGYDGYFINQETTGDLVKPLGEKMRQFMLYSKEYAAKVNHPIKYSWYDAMTYNYGRYHQDGLGEYNYQFMQPEGDKVPADNFFANFNWDKAKNDYTIATANWIGRNPYDVFAGLELQQGGSYKTKVKWNDILDENGKLRLSLGLFAPDTITSLGKTGEDYHKNEDIFFTGYQGDPTGQKPGDKDWYGIANLVADRTPAVGNTFTTSFNTGHGKKWFVDGKVSKDSEWNYRSVSGVLPTWRWWQTSTGEKLRAEYDFTDAYNGGNSLKFSGDVAGKTDQDVRLYSTKLEVTEKTKLRVAHKGGKGSKVYMAFSTTPDYKFDDADAWKELTLSDNWTNEEFDLSSLAGKTIYAVKLFFEHEGAVKDYQFNLGQLTISDNHQEPQSPTSFSVVKQSLKNAQEAEAVVQFKGNKDADFYEVYEKDGDSWKLLTGSSSTTIYLPKVSRSASAQGTTQELKVVAVGKNGVRSEAATTTFDWGMTVKDTSLPKPLAENIVPGATVIDSTFPKTEGGEGIEGMLNGTITSLSDKWSSAQLSGSVDIRLTKPRTVVRWVMDHAGAGGESVNDGLMNTKDFDLYYKDADGEWKLAKEVRGNKAHVTDITLDKPITAQDWRLNVVTSDNGTPWKAIRIYNWKMYEKLDTESVNIPMAKAAARSLGNNKVQVGFADVPAGATITVYDNPNSQTPLATLKSEVGGDLASAPLDLTNQSGLLYYRTQLPGKEISNVLAVSVPKDDRRIKSVSLETGPKKTSYAEGEDLDLRGGVLRVQYEGGTEDELIRLTHAGVSVSGFDTHHKGEQNLTLQYLGQPVNANLSVTVTGQDEASPKTILGIEVSQEPKKDYLVGDSLDLSEGRFAVAYSNDTMEEHSFTDEGVEISGYDAQKTGRQTLTLHYQGHEVSFDVLVSPKAALNDEYLKQKLAEVEAAKNKVVYNFASSEVKEAFLKAIEAAEQVLKDHETSTQDQVNDRLNKLTEAHKALNGQEKFTEEKTELDRLTGEVQELLAAKPNHPSGSALAPLLEKNKALVEKVDLSPEELTTAKQSLKDLVALLKEDKPAVFSDSKTGVEVHFSNKEKTVIKGLKVERVQASAEEKKYFAGEDAHVFEIEGLDEKGQDVDLSYASIVKIPIEKDKKVKKVFFLPEGKEAVELAFEQTDSHVIFTAPHFTHYAFVYESAEKPQPAKPAPQNTVLPKPTYQPTSDQQKAPKLEVQEEKVAFHRQEHENTEMLVGEQRVIIQGRDGLLRHVFEVDENGQRRLRSTEVIQEAIPEIVEIGTKVKTVPAVVATQEKPAQNTAVKSEEASKQLPNTGTADANEALIAGLASLGLASLALTLRRKREDKD

SEQ ID NO: 60 - protein, 487 aa, Streptococcus pneumoniae
MSITSFVKRIQDITRNDAGVNGDAQRIEQMSWLLFLKIYDSREMVWELEEDEYESIIPEELKWRNWAHAQNGERVLTGDELLDFVNNKLFKELKELEITSNMPIRKTIVKSAFEDANNYMKNGVLLRQVINVIDEVDFNSPEDRHSFNDIYEKILKDIQNAGNSGEFYTPRAATDFIAEVLDPKLGESMADLACGTGGFLTSTLNRLSSQRKTSEDTKKYNTAVFGIEKKAFPHLLAVTNLFLHEIDDPKIVHGNTLEKNVREYTDDEKFDIIMMNPPFGGSELETIKNNFPAELRSSETADLFMAVIMYRLKENGRVGVILPDGFLFGEGVKTRLKQKLVDEFNLHTIIRLPHSVFAPYTGIHTNILFFDKTKKTEETWFYRLDMPDGYKNFSKTKPMKSEHFNPVRDWWENREEILEGKFYKSKSFTPSELAELNYNLDQCDFPKEEEEILNPFELIQNYQAERATLNHKIDNVLADILQLLEDK

SEQ ID NO: 61 - protein, 378 aa, Streptococcus pneumoniae
MNNTEFYDRLGVSKNASADEIKKAYRKLSKKYHPDINKEPGAEDKYKEVQEAYETLSDDQKRAAYDQYGAAGANGGFGGAGGFGGFNGAGGFGGFEDIFSSFFGGGGSSRNPNAPRQGDDLQYRVNLTFEEAIFGTEKEVKYHREAGCRTCNGSGAKPGTSPVTCGRCHGAGVINVDTQTPLGMMRRQVTCDVCHGRGKEIKYPCTTCHGTGHEKQAHSVHVKIPAGVETGQQIRLAGQGEAGFNGGPYGDLYVVVSVEASDKFEREGTTIFYNLNLNFVQAALGDTVDIPTVHGDVELVIPEGTQTGKKFRLRSKGAPSLRGGAVGDQYVTVNVVTPTGLNDRQKVALKEFAAAGDLKVNPKKKGFFDHIKDAFDGE

SEQ ID NO: 62 - protein, 453 aa, Streptococcus pneumoniae
MNPNLFRSVEFYQRRYHNYATVLIIPLSLLFTFILIFSLVATKEITVTSQGEIAPTSVIASIQSTSDNPILANHLVANQVVEKGDLLIKYSETMEESQKTALATQLQRLEKQKEGLGILKQSLEKATDLFSGEDEFGYHNTFMNFTKQSHDIELGITKTNTEVSNQANLSNSSSSAIEQEITKVQQQIGEYQELRDAIINNRARLPTGNPHQSILNRYLVASQGQTQGTAEEPFLSQINQSIAGLESSIASLKIQQAGIGSVATYDNSLATKIEVLRTQFLQTASQQQLTVENQLTELKVQLDQATQRLENNTLTSPSKGIVHLNSEFEGKNRIPTGTEIAQIFPVITDTREVLITYYVSSDYLPLLDKGQTVRLKLEKIGNHGTTIIGQLQTIDQTPTRTEQGNLFKLTALAKLSNEDSKLIQYGLQGRVTSVTTKKTYFDYFKDKILTHSD

SEQ ID NO: 63 - protein, 131 aa, Streptococcus pneumoniae
MSKKLNRKKQLRNGLRRAGAFSSTVTKVVDETKKVVKRAEQSASAAGKAVSKKVEQAVEATKEQAQKVANSVEDFAANLGGLPLDRAKTFYDEGIKSASDFKNWTEKELLALKGIGPATIKKLKENGIKFK

SEQ ID NO: 64 - protein, 254 aa, Streptococcus pneumoniae
LISLFGLAAAKPVQADTSIADIQKRGELVVGVKQDVPNFGYKDPKTGTYSGIETDLAKMVADELKVKIRYVPVTAQTRGPLLDNEQVDMDIATFTITDERKKLYNFTSPYYTDASGFLVNKSAKIKKIEDLNGKTIGVAQGSITQRLITELGKKKGLKFKFVELGSYPELITSLHAHRIDTFSVDRSILSGYTSKRTALLDDSFKPSDYGIVTKKSNTELNDYLDNLVTKWSKDGSLQKLYDRYKLKPSSHTAD

SEQ ID NO: 65 - protein, 553 aa, Streptococcus pneumoniae
MSNISLTTLGGVRENGKNMYIAEIGESIFVLNVGLKYPENEQLGVDVVIPNMDYLFENSDRIAGVFLTHGHADAIGALPYLLAEAKVPVFGSELTIELAKLFVKGNDAVKKFNDFHVIDENTEIDFGGTVVSFFPTTYSVPESLGIVLKTSEGSIVYTGDFKFDQTASESYATDFARLAEIGRDGVLALLSDSANADSNIQVASESEVRDEITQTIADWEGRIIVAAVSSNLSRIQQIFDAADKTGRRIVLTGFDIENIVRTAIRLKKLSLANEILLIKPKDMSRFEDHELIILETGRMGEPINGLRKMSIGRHRYVEIKDGDLVYIATAPSIAKEAFVARVENMIYQAGGVVKLITQSLHVSGHGNVRDLQLMINLLQPKYLFPVQGEYRELDAHAKAAMAVGMLPERIFIPKKGTTMAYENGDFVPAGSVSAGDILIDGNAIGDVGNVVLRDRKVLSEDGIFIVAITVNRREKKIVARARVHTRGFVYLKKSRDILRESSELINQTVEEYLQGDDFDWADLKGKVRDNLTKYLFDQTKRRPAILPVVMEAK

SEQ ID NO: 66 - protein, 2233 aa, Streptococcus pneumoniae
MGKGHWNRKRVYSIRKFAVGACSVMIGTCAVLLGGNIAGESVVYADETLITHTAEKPKEEKMIVEEKADKALETKNIVERTEQSEPSSTEAIASEKKEDEAVTPKEEKVSAKPEEKAPRIESQASNQEKPLKEDAKAVTNEEVNQMIEDRKVDFNQNWYFKLNANSKEAIKPDADVSTWKKLDLPYDWSIFNDFDHESPAQNEGGQLNGGEAWYRKTFKLDEKDLKKNVRLTFDGVYMDSQVYVNGQLVGHYPNGYNQFSYDITKYLQKDGRENVIAVHAVNKQPSSRWYSGSGIYRDVTLQVTDKVHVEKNGTTILTPKLEEQQHGKVETHVTSKIVNTDDKDHELVAEYQIVERGGHAVTGLVRTASRTLKAHESTSLDAILEVERPKLWTVLNDKPALYELITRVYRDGQLVDAKKDLFGYRYYHWTPNEGFSLNGERIKFHGVSLHHDHGALGAEENYKAEYRRLKQMKEMGVNSIRTTHNPASEQTLQIAAELGLLVQEEAFDTWYGGKKPYDYGRFFEKDATHPEARKGEKWSDFDLRTMVERGKNNPAIFMWSIGNEIGEANGDAHSLATVKRLVKVIKDVDKTRYVTMGADKFRFGNGSGGHEKIADELDAVGFNYSEDNYKALRAKHPKWLIYGSETSSATRTRGSYYRPERELKHSNGPERNYEQSDYGNDRVGWGKTATASWTFDRDNAGYAGQFIWTGTDYIGEPTPWHNQNQTPVKSSYFGIVDTAGIPKHDFYLYQSQWVSVKKKPMVHLLPHWNWENKELASKVADSEGKIPVRAYSNASSVELFLNGKSLGLKTFNKKQTSDGRTYQEGANANELYLEWKVAYQPGTLEAIARDESGKEIARDKITTAGKPAAVRLIKEDHAIAADGKDLTYIYYEIVDSQGNVVPTANNLVRFQLHGQGQLVGVDNGEQASRERYKAQADGSWIRKAFNGKGVAIVKSTEQAGKFTLTAHSDLLKSNQVTVFTGKKEGQEKTVLGTEVPKVQTIIGEAPEMPTTVPFVYSDGSRAERPVTWSSVDVSKPGIVTVKGMADGREVEARVEVIALKSELPVVKRIAPNTDLNSVDKSVSYVLIDGSVEEYEVDKWEIAEEDKAKLAIPGSRIQATGYLEGQPIHATLVVEEGNPAAPAVPTVTVGGEAVTGLTSQKPMQYRTLAYGAKLPEVTASAKNAAVTVLQASAANGMRASIFIQPKDGGPLQTYAIQFLEEAPKIAHLSLQVEKADSLKEDQTVKLSVRAHYQDGTQAVLPADKVTFSTSGEGEVAIRKGMLELHKPGAVTLNAEYEGAKDQVELTIQANTEKKIAQSIRPVNVVTDLHQEPSLPATVTVEYDKGFPKTHKVTWQAIPKEKLDSYQTFEVLGKVEGIDLEARAKVSVEGIVSVEEVSVTTPIAEAPQLPESVRTYDSNGHVSSAKVAWDAIRPEQYAKEGVFTVNGRLEGTQLTTKLHVRVSAQTEQGANISDQWTGSELPLAFASDSNPSDPVSNVNDKLISYNNQPANRWTNWNRTNPEASVGVLFGDSGILSKRSVDNLSVGFHEDHGVGVPKSYVIEYYVGKTVPTAPKNPSFVGNEDHVFNDSANWKPVTNLKAPAQLKAGEMNHFSFDKVETYAVRIRMVKADNKRGTSITEVQIFAKQVAAAKQGQTRIQVDGKDLANFNPDLTDYYLESVDGKVPAVTASVSNNGLATVVPSVREGEPVRVIAKAENGDILGEYRLHFTKDKSLLSHKPVAAVKQARLLQVGQALELPTKVPVYFTGKDGYETKDLTVEWEEVPAENLTKAGQFTVRGRVLGSNLVAEITVRVTDKLGETLSDNPNYDENSNQAFASATNDIDKNSHDRVDYLNDGDHSENRRWTNWSPTPSSNPEVSAGVIFRENGKIVERTVTQGKVQFFADSGTDAPSKLVLERYVGPEFEVPTYYSNYQAYDADHPFNNPENWEAVPYRADKDIAAGDEINVTFKAIKAKAMRWRMERKADKSGVAMIEMTFLAPSELPQESTQSKILVDGKELADFAENRQDYQITYKGQRPKVSVEENNQVASTVVDSGEDSFPVLVRLVSESGKQVKEYRIHLTKEKPVSEKTVAAVQEDLPKIEFVEKDLAYKTVEKKDSTLYLGETRVEQEGKVGKERIFTAINPDGSKEEKLREVVEVPTDRIVLVGTKPVAQEAKKPQVSEKADTKPIDSSEASQTNKAQLPSTGSAASQAAVAAGLTLLGLSAGLVVTKGKKED

SEQ ID NO: 67 - protein, 332 aa, Streptococcus pneumoniae
MNKRLFSKMSLVTLPILALFSQSVLAEENIHFSSCKEAWANGYSDIHEGEPGYSAKLDRDHDGVACELKNAPKGAFKAKQSTAIQINTSSATTSGWVKQDGAWYYFDGNGNLVKNAWQGSYYLKADGKMAQSEWIYDSSYQAWYYLKSDGSYAKNAWQGAYYLKSNGKMAQGEWVYDSSYQAWYYLKSDGSYARNAWQGNYYLKSDGKMAKGEWVYDATYQAWYYLTSDGSYAYSTWQGNYYLKSDGKMAVNEWVDGGRYYVGADGVWKEVQASTASSSNDSNSEYSAALGKAKSYNSLFHMSKKRMYRQLTSDFDKFSNDAAQYAIDHLDD

SEQ ID NO: 68 - protein, 450 aa, Streptococcus pneumoniae
MKVIDQFKNKKVLVLGLAKSGESAARLLDKLGAIVTVNDGKPFEDNPAAQSLLEEGIKVITGGHPLELLDEEFALMVKNPGIPYNNPMIEKALAKGIPVLTEVELAYLISEAPIIGITGSNGKTTTTTMIGEVLTAAGQHGLLSGNIGYPASQVAQIASDKDTLVMELSSFQLMGVQEFHPEIAVITNLMPTHIDYHGSFSEYVAAKWNIQNKMTAADFLVLNFNQDLAKDLTSKTEATVVPFSTLEKVDGAYLEDGQLYFRGEVVMAANEIGVPGSHNVENALATIAVAKLRDVDNQTIKETLSAFGGVKHRLQFVDDIKGVKFYNDSKSTNILATQKALSGFDNSKVVLIAGGLDRGNEFDELVPDITGLKKMVILGQSAERVKRAADKAGVAYVEATDIADATRKAYELATQGDVVLLSPANASWDMYANFEVRGDLFIDTVAELKE

SEQ ID NO: 69 - protein, 386 aa, Streptococcus pneumoniae
MKKKFALSFVALASVALLAACGEVKSGAVNTAGNSVEEKTIKIGFNFEESGSLAAYGTAEQKGAQLAVDEINAAGGIDGKQIEVVDKDNKSETAEAASVTTNLVTQSKVSAVVGPATSGATAAAVANATKAGVPLISPSATQDGLTKGQDYLFIGTFQDSFQGKIISNYVSEKLNAKKVVLYTDNASDYAKGIAKSFRESYKGEIVADETFVAGDTDFQAALTKMKGKDFDAIVVPGYYNEAGKIVNQARGMGIDKPIVGGDGFNGEEFVQQATAEKASNIYFISGFSTTVEVSAKAKAFLDAYRAKYNEEPSTFAALAYDSVHLVANAAKGAKNSGEIKNNLAKTKDFEGVTGQTSFDADHNTVKTAYMMTMNNGKVEAAEVVKP

SEQ ID NO: 70 - protein, 513 aa, Streptococcus pneumoniae
MSILEVKNLSHGFGDRAIFEDVSFRLLKGEHIGLVGANGEGKSTFMSIVTGKMLPDEGKVEWSKYVTAGYLDQHSVLAERQSVRDVLRTAFDELFKAEARINDLYMKMAEDGADVDALMEEVGELQDRLESRDFYTLDAKIDEVARALGVMDFGMDTDVTSLSGGQRTKVLLAKLLLEKPDILLLDEPTNYLDAEHIDWLKRYLQNYENAFVLISHDIPFLNDVINIVYHVENQQLTRYSGDYYQFQEVYAMKKSQLEAAYERQQKEIADLKDFVARNKARVATRNMAMSRQKKLDKMDIIELQSEKPKPSFDFKPARTPGRFIFQAKNLQIGYDRPLTKPLNLTFERNQKVAIIGANGIGKTTLLKSLLGIISPIAGEVERGDYLELGYFEQEVEGGNRQTPLEAVWNAFPALNQAEVRAALARCGLTTKHIESQIQVLSGGEQAKVRFCLLMNRENNVLVLDEPTNHLDVDAKDELKRALKEYRGSILMVCHEPDFYEGWIDQIWDFNNLT

SEQ ID NO: 71 - protein, 399 aa, Streptococcus pneumoniae
MKKKNGKAKKWQLYAAIGAASVVVLGAGGILLFRQPSQTALKDEPTHLVVAKEGSVASSVLLSGTVTAKNEQYVYFDASKGDLDEILVSVGDKVSEGQALVKYSSSEAQAAYDSASRAVARADRHINELNQARNEAASAPAPQLPAPVGGEDATVQSPTPVAGNSVASIDAQLGDARDARADAAAQLSKAQSQLDATTVLSTLEGTVVEVNSNVSKSPTGASQVMVHIVSNENLQVKGELSEYNLANLSVGQEVSFTSKVYPDKKWTGKLSYISDYPKNNGEAASPAAGNNTGSKYPYTIDVTGEVGDLKQGFSVNIEVKSKTKAILVPVSSLVMDDSKNYVWIVDEQQKAKKVEVSLGNADAENQEITSGLTNGAKVISNPTSSLEEGKEVKADEATN

SEQ ID NO: 72 - protein, 230 aa, Streptococcus pneumoniae
SETNHEIDSNFAGRLNILRAGVLDANDGIISIAGVVIGVASATTNIWIIFLSGFTAILAGAFSMAGGEYVSVSTPKDTEEAAVSREKLLLDQDRELAKKSLYAAYIQNGEFKTSAQLLTNKIFLKNPLKALVEEKYGIEYEEFTNPWHAAISSFVAFFLRSLPPMLSVTIFPSDYRIPATVLIVGVALLLTGYTSARLGKAPTKTAMIRNLAIGLLTMGVTFLLGQLFSI

SEQ ID NO: 73 - protein, 627 aa, Streptococcus pneumoniae
MKKKLTSLALVGAFLGLSWYGNVQAQESSGNKIHFINVQEGGSDAIILESNGHFAMVDTGEDYDFPDGSDSRYPWREGIETSYKHVLTDRVFRRLKELGVQKLDFILVTHTHSDHIGNVDELLSTYPVDRVYLKKYSDSRITNSERLWDNLYGYDKVLQTAAEKGVSVIQNITQGDAHFQFGDMDIQLYNYENETDSSGELKKIWDDNSNSLISVVKVNGKKIYLGGDLDNVHGAEDKYGPLIGKVDLMKFNHHHDTNKSNTKDFIKNLSPSLIVQTSDSLPWKNGVDSEYVNWLKERGIERINAASKDYDATVFDIRKDGFVNISTSYKPIPSFQAGWHKSAYGNWWYQAPDSTGEYAVGWNEIEGEWYYFNQTGILLQNQWKKWNNHWFYLTDSGASAKNWKKIAGIWYYFNKENQMEIGWIQDKEQWYYLDVDGSMKTGWLQYMGQWYYFAPSGEMKMGWVKDKETWYYMDSTGVMKTGEIEVAGQHYYLEDSGAMKQGWHKKANDWYFYKTDGSRAVGWIKDKDKWYFLKENGQLLVNGKTPEGYTVDSSGAWLVDVSIEKSATIKTTSHSEIKESKEVVKKDLENKETSQHESVTNFSTSQDLTSSTSQSSETSVNKSESEQ

SEQ ID NO: 74 - protein, 456 aa, Streptococcus pneumoniae
MDLGPTQRGISVVSQSYINVIGAGLAGSEAAYQIAERGIPVKLYEMRGVKSTPQHKTDNFAELVCSNSLRGDALTNAVGLLKEEMRRLGSVILESAEATRVPAGGALAVDRDGFSQMVTEKVANHPLIEVVRDEITELPTDVITVIATGPLTSDALAEKIHALNDGAGFYFYDAAAPIIDVNTIDMSKVYLKSRYDKGEAAYLNAPMTKQEFMDFHEALVNAEEAPLSSFEKEKYFEGCMPIEVMAKRGIKTMLYGPMKPVGLEYPDDYTGPRDGEFKTPYAVVQLRQDNAAGSLYNIVGFQTHLKWGEQKRVFQMIPGLENAEFVRYGVMHRNSYMDSPNLLEQTYRSKKQPNLFFAGQMTGVEGYVESAASGLVAGINAARLFKEESEAIFPETTAIGSLAHYITHADSKHFQPMNVNFGIIKELEGERIRDKKARYEKIAERALADLEEFLTV

SEQ ID NO: 75 - protein, 360 aa, Streptococcus pneumoniae
MLIGIPKEIKNNENRVALTPAGVHSLVSRGHRVLIETNAGLGSGFTDADYQKQGAEIVATAGEAWAAELVVKVKESLSSEYGYLRDDLLLFTYLHMAAAPELADAMLTAKTTETVRDNQGQLPLLVPMSEVAGRMAVQIGAHFLTKQAGGSGVLLGGVPGVPKGKVTIIGGGVVGTHAARIALGLGAQVTILDISSKRLSVLEEVFGSQIQTLMSNSFNIEASVRDADVVIGAILIPGAKAPELVTDEMVKQMRPGSVSLTLLLTKVALSKQLTVQRTMNPSMKNTVFSTMPLPISLVRLLALQPSPPMSLFLISKLWLAKDSHKQSLKMKACVKVLLIKVTLTYQLLKDLIVTTLISMI

SEQ ID NO: 76 - protein, 477 aa, Streptococcus pneumoniae
MKILFVAAEGAPFSKTGGLGDVIGALPKSLVKAGHEVAVILPYYDMVEAKFGNQIEDVLHFEVSVGWRRQYCGIKKTVLNGVTFYFIDNQYYFFRGHVYGDFDDGERFAFFQLAAIEAMERIDFIPDLLHVHDYHTAMIPFLLKEKYRWIQAYEDIETVLTIHNLEFQGQFSEGMLGDLFGVGFERYADGTLRWNNCLNWMKAGILYANRVSTVSPSYAHEIMTSQFGCNLDQILKMESGKVSGIVNGIDADLYNPQTDALLDYHFNQEDLSGKAKNKAKLQERVGLPVRADVPLVGIVSRLTRQKGFDVVVESLHHILQEDVQIVLLGTGDPAFEGAFSWFAQIYPDKLSTNITFDVKLAQEIYAACDLFLMPSRFEPCGLSQMMAMRYGTLPLVHEVGGLRDTVRAFNPIEGSGTGFSFDNLSPYWLNWTFQTALDLYRNHPDIWRNLQKQAMESDFSWDTACKSYLDLYHSLVN

SEQ ID NO: 77 - protein, 2004 aa, Streptococcus pneumoniae
MEKYFGEKQERFSFRKLSVGLVSATISSLFFMSVLASSSVDAQETAGVHYKYVADSELSSEEKKQLVYDIPTYVENDDETYYLVYKLNSQNQLAELPNTGSKNERQALVAGASLAAMGILIFAVSKKKVKNKTVLHLVLVAGIGNGVLVSVHALENHLLLNYNTDYELTSGEKLPLPKEISGYTYIGYIKEGKTTSESEVSNQKSSVATPTKQQKVDYNVTPNFVDHPSTVQAIQEQTPVSSTKPTEVQVVEKPFSTELINPRKEEKQSSDSQEQLAEHKNLETKKEEKISPKEKTGVNTLNPQDEVLSGQLNKPELLYREETMETKIDFQEEIQENPDLAEGTVRVKQEGKLGKKVEIVRIFSVNKEEVSREIVSTSTTAPSPRIVEKGTKKTQVIKEQPETGVEHKDVQSGAIVEPAIQPELPEAVVSDKGEPEVQPTLPEAVVTDKGETEVQPESPDTVVSDKGEPEQVAPLPEYKGNIEQVKPETPVEKTKEQGPEKTEEVPVKPTEETPVNPNEGTTEGTSIQEAENPVQPAEESTTNSEKVSPDTSSKNTGEVSSNPSDSTTSVGESNKPEHNDSKNENSEKTVEEVPVNPNEGTVEGTSNQETEKPVQPAEETQTNSGKIANENTGEVSNKPSDSKPPVEESNQPEKNGTATKPENSGNTTSENGQTEPEPSNGNSTEDVSTESNTSNSNGNEEIKQENELDPDKKVEEPEKTLELRNVSDLELYSLSNGTYKQHISLEQVPSNPNSYFVKVKSSSFKDVYLPVASISEERKNDKILYKITAKVEKLQQEIESRYKDNFTFYLAKKGTEETTNFTSFSNLVKAINQNPSGTYHLAASLNANEVELGPDERSYIKDTFTGRLIGEKDGKNYAIYNLKKPLFENLSGATVEKLSLKNVAISGKDDIGSLANEAQNNTKIKQVHVDGVLAGERGIGGLLAKAEQSSITESSFKGRIINTYETTAAYNIGGMVGHLTGDKALLTKSKATVAISSNTNTSDQTVGGLAGLVDRDAQIQDSYAEGDINNVKHFGRVAGVAGNLWDRTSGDVRHAGSLTNVLSDVNVTNGNAITGYHYNEMKVKDTFSSKANRVYNVTLVKDEVVSKESFEERGTMLDASQIASKKAEINPLILPTVEPLSTSGKKDSDFSKVAYYQAKRNLTYKNIEKLLPFYNKATIVKYGNLVNENSLLYQKELLSAVMMKDNQVITDIVSNKQTANKLLLHYKDDLSEKLDLKYQNDFAKLAEYSLGNTGLLYTPNQFLYDQTSIIKQVLPDLQKVDYHSEAIRKTLGISPNVKQTELYLEDQFAKTKQQLEDSLKKLLSADAGLASANPVTEGYLVDKIKRNKEALLLGLTYLERWYNFSYGQVNVKDLVLYHLDFFGKGNASPLDTLIELGKSGFNNLLAKNNVDTYGISLASQHGTTDLFSTLEHYRKVFLPNTSNNDWFKSETKAYIVEEKSTIEEVKTKQGLAGTKYSIGVYDRITSATWKYRNMVLPLLTLPERSVFVISTMSSLGFGAYDRYRSSDHKAGKALNDFVEENARETAKRQRDHYDYWYRILDDNAREKLYRNILLYDAYKFGDDNTVGKATEVADFDNPNPAMQHFFGPVGNKVGHNQHGAYATGDAVYYMGYRMLDKDGAITYTHEMTHDSDQDIYLGGYGRRSGLGPEFFAKGLLQAPDHPDDATITINSILKHSKSDSTESRRLQVLDPTTRFNNADDLKQYVHNMFDVVYMLEYLEGNSILKLDTNQKQQLLRKVTNEYHPDPDGNKVYATNVVRNLTVEEVERLRSFNDLIDNNILSSREYASGKYERNGYFTIKLFAPIYAALSNDIGTPGDLMGRRIAYELLAAKGFKDGMVPYISNQYEEEAKQKGKTINLYGKTRGLVTDDLVLEKVFNNQYHTWSEFKKAMYQERQDQFDRLNKVTFNDTTQPWQTFAKKTTSSVDELQKLMDVAVRKDAEHNYYHWNNYNPDIDSEVHKLKRAIFKAYLDQTNDFRSSIFENKK

SEQ ID NO: 78 - protein, 1084 aa, Streptococcus pneumoniae
MPVEIKTTKEIHPKIYAYTTPTVTSNEGWIKIGYTERDVTQRIKEQTHTAHIATDVLWTGDAAYTEEPDKGKTFKDHDFHHFLSFHDVERRPKTEWFYFNGTPEKSKNLFDKFVQHDLSGYQPGKGQDYTLRQEQEEAVAKTLAYFQEHAGGKFLWNAKPRFGKTLSTYDLARRMEAVNVLIVTNRPAIANSWYDDFETFIAGQTTYKFVSESDSLKSRPILSRQEFLGILADDVRQLAFISLQDLKGSVYLGGEHDKLKWVTDLHWDLLVIDEAHEGVDTFKTDQAFNKIRRNFTLHLSGTSFKALAKGDFTEEQIYNWSYADEQAAKYSWSLEQEEENPYESLPQLNLFTYQMSQMIGEKLEKGAQIDGENIDYVFDLSEFFATDDKGKFIHEHDVRNWLDTLSSNEKYPFSTKELRNELKHTFWLLERVASAKALKALLEEHPIYENYEIVLAAGDGRMSEEDDKVKLKSLDLVRKAIAENDKTITLSVGQLTTGVTIPEWTGVLMLSNLKSPALYMQAAFRAQNPYSWSDNKGNHFRKERAYVFDFAPERTLILFDEFANNLLLVTAAGRGTSATREENIRELLNFFPIIAEDRAGKMVEIDAKAVLTTPRQIKAREVLKRGFMSNLLFDNISGIFQASQTVLDILNELPVEKEGKVQDSSDLLDFSDVTVDDEGNAVVDHEIVVNQQMRLFGEKVYGLGESVAELVTKDEERTQKQLVNDLSKTVSSVIVEELKADYSLKTRETEQIKKQITATLENEIRKNDIERKISEAHIKQELQQQLKEANDKAQKDKIQEDLEKRLEENKLIHKEKLEQTLKKEVEKMPEKFIEQVEIKRVEQLKQSAQDEIRDHLRGFARTIPSFIMAYGDQTLTLDNFDAFVPEHVFYEVTGITIDQFRYLRDGGQDFAGHLFDKATFDEAIQEFLRKKKELADYFKDQKEDIFDYIPPQKTNQIFTPKRVVKRMVDDLEKENPGIFDDPSKTFIDLYMKSGLYIAELVKRLYNSNGLKEAFPNPEERLKHILEKQVYGFAPSEIIYNISTNFIFGNLSKDISRKNFVLADTIPAAKEGSIQKLVDSYFENN

SEQ ID NO: 79 - protein, 234 aa, Streptococcus pneumoniae
MKKILIVDDEKPISDIIKFNMTKEGYEVVTAFNGREALEQFEAEQPDIIILDLMLPEIDGLEVAKTIRKTSSVPILMLSAKDSEFDKVIGLELGADDYVTKPFSNRELQARVKALLRRSQPMPVDGQEADSKPQPIQIGDLEIVPDAYVAKKYGEELDLTHREFELLYHLASHTGQVITREHLLETVWGYDYFGDVRTVDVTVRRLREKIEDTPSRPEYILTRRGVGYYMRNNA

SEQ ID NO: 80 - protein, 721 aa, Streptococcus pneumoniae
MKKKFLAFLLILFPIFSLGIAKAETIKIVSDTAYAPFEFKDSDQTYKGIDVDIINKVAEIKGWNIQMSYPGFDAAVNAVQAGQADAIMAGMTKTKEREKVFTMSDTYYDTKVVIATTKSHKISKYDQLTGKTVGVKNGTAAQRFLETIKDKYGFTIKTFDTGDLMNNSLSAGAIDAMMDDKPVIEYAINQGQDLHIEMDGEAVGSFAFGVKKGSKYEHLVTEFNQALSEMKKDGSLDKIIKKWTASSSSAVPTTTTLAGLKAIPVKAKYIIASDSSFAPFVFQNSSNQYTGIDMELIKAIAKDQGFEIEITNPGFDAAISAVQAGQADGIIAGMSVTDARKATFDFSESYYTANTILGVKESSNIASYEDLKGKTVGVKNGTASQTFLTENQSKYGYKIKTFADGSSMYDSLNTGAIDAVMDDEPVLKYSISQGQKLKTPISGTPIGETAFAVKKGANPELIEMFNNGLANLKANGEFQKILDKYLASESSTASTSTVDETTLWGLLQNNYKQLLSGLGITLALALISFAIAIVIGIIFGMFSVSPYKSLRVISEIFVDVIRGIPLMILAAFIFWGIPNFIESITGQQSPINDFVAGTIALSLNAAAYIAEIVRGGIQAVPVGQMEASRSLGISYGKTMRKIILPQATKLMLPNFVNQFVIALKDTTIVSAIGLVELFQTGKIIIARNYQSFKMYAILAIFYLVIITLLTRLAKRLEKRIR

SEQ ID NO: 81 - protein, 523 aa, Streptococcus pneumoniae
MAFESLTERLQNVFKNLRKKGKISESDVQEATKEIRLALLEADVALPVVKDFIKKVRERAVGHEVIDTLNPAQQIIKIVDEELTAVLGSDTAEIIKSPKIPTIIMMVGLQGAGKTTFAGKLANKLKKEENARPLMIAADIYRPAAIDQLKTLGQQIDVPVFALGTEVPAVEIVRQGLEQAQTNHNDYVLIDTAGRLQIDELLMNELRDVKALAQPNEILLVVDAMIGQEAANVAREFNAQLEVTGVILTKIDGDTRGGAALSVRHITGKPIKFTGTGEKITDIETFHPDRMSSRILGMGDMLTLIEKASQEYDEQKALEMAEKMRENTFDFNDFIDQLDQVQNMGPMEDLLKMIPGMANNPALQNMKVDERQIARKRAIVSSMTPEERENPDLLNPSRRRRIAAGSGNTFVEVNKFIKDFNQAKQLMQGVMSGDMNKMMKQMGINPNNLPKNMPNMGGMDMSALEGMMGQGGMPDLSALGGAGMPDMSQMFGGGLKGKIGEFAMKQSMKRMANKMKKAKKKRK

SEQ ID NO: 82 - protein, 233 aa, Streptococcus pneumoniae
MSQIWTKEKFISQVQGGVIVSCQALPGEALYNEEFSLMPFMAKAALEAGAVGIRANSVRDIKAIQKVVDLPIIGIIKRDYPPQEPYITATMKEVDELVECGTTVIAFDATLRPRYDGLVVSEFIKKIKEKYPNQLLMADVSNLDEGLYAFKSGVDFVGTTLSGYTSTSVQSDEPDFELMKKLADFNIPVIAEGKIHYPEQLKKAYSLGVTSVVIGGAITRPKEIAQRFINVIK

SEQ ID NO: 83 - protein, 388 aa, Streptococcus pneumoniae
MRYLTAGESHGPRLTAIIEGIPAGLPLTAEDINEDLRRRQGGYGRGGRMKIENDQVVFTSGVRHGKTTGAPITMDVINKDHQKWLDIMSAEDIEDRLKSKRKITHPRPGHADLVGGIKYRFDDLRNSLERSSARETTMRVAVGAVAKRLLAELDMEIANHVVVFGGKEIDVPENLTVAEIKQRAAQSEVSIVNQEREQEIKDYIDQIKRDGDTIGGVVETVVGGVPVGLGSYVQWDRKLDARLAQAVVSINAFKGVEFGLGFEAGYRKGSQVMDEILWSKEDGYTRRTNNLGGFEGGMTNGQPIVVRGVMKPIPTLYKPLMSVDIETHEPYKATVERSDPTALPAAGMVMEAVVATVLAQEILEKFSSDNLEELKEAVAKHRDYTKNY

SEQ ID NO: 84 - protein, 390 aa, Streptococcus pneumoniae
MVVMNRIRVSKRVEKKLAKGLVLLEASDLENVNLKDQEVEVQGQEGNFLGTAYLSQQNKGLGWFISKDKVAFNQAFFETLFRKAKEKRNAYYQDDLTTAFRLFNQEGDGFGGLTVDLYGDYAVFSWYNSYVYQIRQTISEAFRQVFPEVLGAYEKIRFKGLDYESAHVYGQEAPDFFNVLENGVLYQVFMNDGLMTGIFLDQHEVRGSLVDGLAMGKSLLNMFSYTAAFSVAAAMGGASHTTSVDLAKRSRELSQAHFQANGLSTDEHRFIVMDVFEYFKYAKRKDLTYDVIVLDPPSFARNKKQTFSVAKDYHKLISQSLEILNPGGIIIASTNAANVSRQKFTEQIDKGFAGRSYQILNKYGLPADFAYNKKDESSNYLKVISMKVSK

SEQ ID NO: 85 - protein, 428 aa, Streptococcus pneumoniae
MTKTLKRPEVLSPAGTLEKLKVAVQYGADAVFIGGQAYGLRSRAGNFTFEQMEEGVQFAAKYGAKVYVAANMVMHEGNEAGAGEWFRKLRDIGIAAVIVSDPALIMIAVTEAPGLEIHLSTQASATNYETLEFWKELGLTRVVLAREVSMEELAEIRKRTDVEIEAFVHGAMCISYSGRCTLSNHMSMRDANRGGCSQSCRWKYDLYDMPFGKERKSLQGEIPEEFSMSAVDMSMIDHIPDMIENGVDSLKIEGRMKSIHYVSTVTNCYKAAVDAYLESPEKFEAIKQDLVDEMWKVAQRELATGFYYGTPSENEQLFGARRKIPEYKFVAEVVSYDDAAQTATIRQRNVINEGDQVEFYGPGFRHFETYIEDLHDAKGNKIDRAPNPMELLTIKVPQPVQSGDMVRALKEGLINLYKEDGTSVTVRA

SEQ ID NO: 86 - protein, 280 aa, Streptococcus pneumoniae
MNTYQLNNGVEIPVLGFGTFKAKDGEEAYRAVLEALKAGYRHIDTAAIYQNEESVGQAIKDSGVPREEMFVTTKLWNSQQTYEQTRQALEKSIEKLGLDYLDLYLIHWPNPKPLRENDAWKTRNAEVWRAMEDLYQEGKIRAIGVSNFLPHHLDALLETATIVPAVNQVRLAPGVYQDQVVAYCREKGILLEAWGPFGQGELFDSKQVQEIAANHGKSVAQIALAWSLAEGFLPLPKSVTTSRIQANLDCFGIELSHEERETLKTIAVQSGAPRVDDVDF

SEQ ID NO: 87 - protein, 551 aa, Streptococcus pneumoniae
LSEKSREEEKLSFKEQILRDLEKVKGYDEVLKEDEAVVRTPANEPSTEELMADSLSTVEEIMRKAPTVPTHPSQGVPASPADEIQRETPGVPSHPSQDVPSSPAEESGSRPGPGPVRPKKLEREYNETPTRVAVSYTTAEKKAEQAGPETPTPATETVDIIRDTSRRSRREGAKPVKPKKEKKSHVKAFVISFLVFLALLSAGGYFGYQYVLDSLLPIDANSKKYVTVGIPEGSNVQEIGTTLEKAGLVKHGLIFSFYAKYKNYTDLKAGYYNLQKSMSTEDLLKELQKGGTDEPQEPVLATLTIPEGYTLDQIAQAVGQLQGDFKESLTAEAFLAKVQDETFISQAVAKYPTLLESLPVKDSGARYRLEGYLFPATYSIKESTTIESLIDEMLAAMDKNLSPYYSTIKSKNLTVNELLTIASLVEKEGAKTEDRKLIAGVFYNRLNRDMPLQSNIAILYAQGKLGQNISLAEDVAIDTNIDSPYNVYKNVGLMPGPVDSPSLDAIESSINQTKSDNLYFVADVTEGKVYYANNQEDHDRNVAEHVNSKLN

SEQ ID NO: 88 - protein, 205 aa, Streptococcus pneumoniae
MKQERFPLVSDDEVMLTEMPVMNLYDESDLISNIKGEYRDKNYLEWAPIAEEKPVKPIEKQVEKPKKAPLGVKKEGKSYAEVAREEARADLKKKRSANYLTQDFSLARRHSQPSLVRQGNQPTAPFQKENPGEFVKYSQKLTQSHYILAEEVHSIPTKNEEVSAPAPKKNNYDFLKKSQIYNKKSKQTEQERRVAQELNLTRMTE

SEQ ID NO: 89 - protein, 652 aa, Streptococcus pneumoniae
MKKSKSKYLTLAGLVLGTGVLLSACGNSSTASKTYNYVYSSDPSSLNYLAENRAATSDIVANLVDGLLENDQYGNIIPSLAEDWTVSQDGLTYTYKLRKDAKWFTSEGEEYAPVTAQDFVTGLQYAADKKSEALYLVQDSVAGLDDYITGKTSDFSTVGVKALDDQTVQYTLVKPELYWNSKTLATILFPVNADFLKSKGDDFGKADPSSILYNGPFLMKALVSKSAIEYKKNPNYWDAKNVFVDDVKLTYYDGSDQESLERNFTAGAYTTARLFPNSSSYEGIKEKYKNNIIYSMQNSTSYFFNFNLDRKSYNYTSKTSDIEKKSTQEAVLNKNFRQAINFAFDRTSYGAQSEGKEGATKILRNLVVPPNFVSIKGKDFGEVVASKMVNYGKEWQGINFADGQDPYYNPEKAKAKFAEAKKELEAKGVQFPIHLDKTVEVTDKVGIQGVSSIKQSIESVLGSDNVVIDIQQLTSDEFDSSGYFAQTAAQKDYDLYHGGWGPDYQDPSTYLDIFNTNSGGFLQNLGLEPGEANDKAKAVGLDVYTQMLEEANKEQDPAKRYEKYADIQAWLIDSSLVLPSVSRGGTPSLRRTVPFAAAYGLTGTKGVESYKYLKVQDKIVTTDEYAKAREKWLKEKEESNKKAQEELAKHVK

SEQ ID NO: 90 - protein, 158 aa, Streptococcus pneumoniae
MAKEPWQEDIYDQEESRAERRHRNHGGADRMANRILTILASIFFVIVVVMVIVLIYLSSGGSNRTAALKGFHDSDASVVQISSSSSSQPEQSSEPESTSSSSEEAANPEGTIKVLAGEGEAAIAARAGISIAQLEALNPGHMATGSWFANPGDVIKIK

SEQ ID NO: 91 - protein, 262 aa, Streptococcus pneumoniae
MPITSLEIKDKTFGTRFRGFDPEEVDEFLDIVVRDYEDLVRANHDKNLRIKSLEERLSYFDEIKDSLSQSVLIAQDTAERVKQAAHERSNNIIHQAEQDAQRLLEEAKYKANEILRQATDNAKKVAVETEELKNKSRVFHQRLKSTIESQLAIVESSDWEDILRPTATYLQTSDEAFKEVVSEVLGEPIPAPIEEEPIDMTRQFSQAEMAELQARIEVADKELSEFEAQIKQEVEAPTPVVSPQVEEEPLLIQLAQCMKNQK

SEQ ID NO: 92 - protein, 179 aa, Streptococcus pneumoniae
MSLKDRFDRFIDYFTEDEDSSLPYEKRDEPVFTSVNSSQEPALPMNQPSQSAGTKENNITRLHARQQELANQSQRATDKVIIDVRYPRKYEDATEIVDLLAGNESILIDFQYMTEVQARRCLDYLDGACHVLAGNLKKVASTMYLLTPVNVIVNVEDIRLPDEDQQGEFGFDMKRNRVR

SEQ ID NO: 93 - protein, 305 aa, Streptococcus pneumoniae
MSDLKKYEGVIPAFYACYDDQGEVSPERTRALVQYFIDKGVQGLYVNGSSGECIYQSVEDRKLILEEVMAVAKGKLTIIAHVACNNTKDSMELARHAESLGVDAIATIPPIYFRLPEYSVAKYWNDISSAAPNTDYVIYNIPQLAGVALTPSLYTEMLKNPRVIGVKNSSMPVQDIQTFVSLGGEDHIVFNGPDEQFLGGRLMGARAGIGGTYGAMPELFLKLNQLIADKDLETARELQYAINAIIGKLTSAHGNMYGVIKEVLKINEGLNIGSVRSPLTPVTEEDRPVVEAAAALIRETKERFL

SEQ ID NO: 94 - protein, 659 aa, Streptococcus pneumoniae
MIQIGKIFAGRYRIVKQIGRGGMADVYLAKDLILDGEEVAVKVLRTNYQTDPIAVARFQREARAMADLDHPHIVRITDIGEEDGQQYLAMEYVAGLDLKRYIKEHYPLSNEEAVRIMGQILLAMRLAHTRGIVHRDLKPQNILLTPDGTAKVTDFGIAVAFAETSLTQTNSMLGSVHYLSPEQARGSKATVQSDIYAMGIIFYEMLTGHIPYDGDSAVTIALQHFQKPLPSVIAENPSVPQALENVIIKATAKKLTNRYRSVSEMYVDLSSSLSYNRRNESKLIFDETSKADTKTLPKVSQSTLTSIPKVQAQTEHKSIKNPSQAVTEETYQPQAPKKHRFKMRYLILLASLVLVAASLIWILSRTPATIAIPDVAGQTVAEAKATLKKANFEIGEEKTEASEKVEEGRIIRTDPGAGTGRKEGTKINLVVSSGKQSFQISNYVGRKSSDVIAELKEKKVPDNLIKIEEEESNESEAGTVLKQSLPEGTTYDLSKATQIVLTVAKKATTIQLGNYIGRNSTEVISELKQKKVPENLIKIEEEESSESEPGTIMKQSPGAGTTYDVSKPTQIVLTVAKKVTSVAMPSYIGSSLEFTKNNLIQIVGIKEANIEVVEVTTAPAGSAEGMVVEQSPRAGEKVDLNKTRVKISIYKPKTTSATP

SEQ ID NO: 95 - protein, 311 aa, Streptococcus pneumoniae
MTKLIFMGTPDFSATVLKGLLTDDRYEILAVVTQPDRAVGRKKVIQETPVKQAAKEAGLSIYQPEKLSGSPEMEDLMKLGADGIVTAAFGQFLPSKLLDSMDFAVNVHASLLPRHRGGAPIHYALIQGDEEAGVTIMEMVKEMDAGDMISRRSIPITDEDNVGTLFEKLALVGRDLLLDTLPAYIAGDIKPEPQDTSQVTFSPNIKPEEEKLDWNKTNRQLFNQIRGMNPWPVAHTFLKGDRFKIYEALPVEGQGNPGEILSIGKKELIVATAEGALSLKQVQPAGKPKMDIASFLNGVGRTLTVGERFGD

SEQ ID NO: 96 - protein, 790 aa, Streptococcus pneumoniae
VFRRLGQDFQLRKVKKILKQINALKGKMSSLSDQELVAKTVEFRQRLSEGESLDDILVEAFAVVREADKRILGMFPYDVQVMGAIVMHYGNVAEMNTGEGKTLTATMPVYLNAFSGEGVMVVTPNEYLSKRDAEEMGQVYRFLGLTIGVPFTEDPKKEMKAEEKKLIYASDIIYTTNSNLGFDYLNDNLASNEEGKFLRPFNYVIIDEIDDILLDSAQTPLIIAGSPRVQSNYYAIIDTLVTTLVEGEDYIFKEEKEEVWLTTKGAKSAENFLGIDNLYKEEHASFARHLVYAIRAHKLFTKDKDYIIRGNEMVLVDKGTGRLMEMTKLQGGLHQAIEAKEHVKLSPETRAMASITYQSLFKMFNKISGMTGTGKVAEKEFIETYNMSVVRIPTNRPRQRIDYPDNLYITLPEKVYASLEYIKQYHAKGNPLLVFVGSVEMSQLYSSLLFREGIAHNVLNANNAAREAQIISESGQMGAVTVATSMAGRGTDIKLGKGVAELGGLIVIGTERMESQRIDLQIRGRSGRQGDPGMSKFFVSLEDDVIKKFGPSWVHKKYKDYQVQDMTQPEVLKGRKYRKLVEKAQHASDSAGRSARRQTLEYAESMNIQRDIVYKERNRLIDGSRDLEDVVVDIIERYTEEVAADHYASRELLFHFIVTNISFHVKEVPDYIDVTDKTAVRSFMKQVIDKELSEKKELLNQHDLYEQFLRLSLLKAIDDNWVEQVDYLQQLSMAIGGQSASQKNPIVEYYQEAYAGFEAMKEQIHADMVRNLLMGLVEVTPKGEIVTHFP

SEQ ID NO: 97 - protein, 4776 aa, Streptococcus pneumoniae
MTETVEDKVSHSITGLDILKGIVAAGAVISGTVATQTKVFTNESAVLEKTVEKTDALATNDTVVLGTISTSNSASSTSLSASESASTSASESASTSASTSASTSASESASTSASTSISASSTVVGSQTAAATEATAKKVEEDRKKPASDYVASVTNVNLQSYAKRRKRSVDSIEQLLASIKNAAVFSGNTIVNGAPAINASLNIAKSETKVYTGEGVDSVYRVPIYYKLKVTNDGSKLTFTYTVTYVNPKTNDLGNISSMRPGYSIYNSGTSTQTMLTLGSDLGKPSGVKNYITDKNGRQVLSYNTSTMTTQGSGYTWGNGAQMNGFFAKKGYGLTSSWTVPITGTDTSFTFTPYAARTDRIGINYFNGGGKVVESSTTSQSLSQSKSLSVSASQSASASASTSASASASTSASASASTSASASASTSASVSASTSASASASTSASASASTSASESASTSASASASTSASASASTSASASASTSASESASTSASASASTSASESASTSASASASTSASASASTSASGSASTSTSASASTSASASASTSASASASISASESASTSASESASTSTSASASTSASESASTSASASASTSASASASTSASASASTSASASTSASESASTSASASASTSASASASTSASASASTSASASASTSASVSASTSASASASTSASASASTSASESASTSASASASTSASASASTSASASASTSASASASTSASASASTSASESASTSASASASTSASASASTSASASASTSASASASTSASASASISASESASTSASASASTSASASASTSASASASTSASESASTSASASASTSASASASTSASASASTSASASASTSASASASTSASASASTSASESASTSASASASTSASESASTSASASASTSASASASTSASASASTSASASASTSASASASTSASASASTSASASTSASESASTSASASASTSASASASTSASASASTSASESASTSASASASTSASASASTSASASASTSASASASTSASASASISASESASTSASASASTSASVSASTSASASASTSASESASTSASASASTSASESASTSASASASTSASASASISASESASTSASASASTSASASASTSASASASTSASESASTSTSASASTSASESASTSASASASTSASASASTSASASASTSASASASTSASASTSASESASTSASASASTSASASASTSASASASTSASASASTSASASASTSASASASTSASASASTSASASASTSASESASTSASASASTSASASASTSASASASTSASASASTSASVSASTSASESASTSASASASTSASASASTSASESASTSASASASTSASESASTSASASASTSASASASTSASASASTSASASASTSASASASTSASASASTSASASASTSASASASTSASASASTSASASASTSASASASTSASASASTSASASASISASESASTSASASASTSASASASTSASVSASTSASASASTSASASASISASESASTSASASASTSASASASTSASASASTSASASASISASESASTSASASASTSASASASTSASASASTSASASASTSASASASTSASASASTSASASASTSASASASTSASASASTSASESASTSASASASTSASASASTSASASASTSASVSASTSASESASTSASASASTSASASASTSASASASTSASESASTSASASASTSASASASTSASESASTSASASASTSASASASTSASASASTSASASASASTSASASASTSASASASTSASASASISASESASTSASESASTSTSASASTSASESASTSASASASTSASASASTSASASASTSASASTSASESASTSASASASTSASASASTSASASASTSASASASTSASASASTSASVSASTSASASASTSASASASTSASESASTSASASASTSASASASTSASASASTSASASASTSASASASTSASESASTSASASASTSASASASTSASASASTSASASASTSASASASISASESASTSASASASTSASASASTSASASASTSASESASTSASASASTSASASASTSASASASTSASASASTSASASASTSASASASTSASESASTSASASASTSASESASTSASASASTSASASASTSASASASTSASASASTSASASASTSASASASTSASASTSASESASTSASASASTSASASASTSASASASTSASESASTSASASASTSASASASTSASASASTSASASASTSASASASISASESASTSASASASTSASVSASTSASASASTSASESASTSASASASTSASESASTSASASASTSASASASISASESASTSASASASTSASASASTSASASASTSASESASTSTSASASTSASESASTSASASASTSASASASTSASASASTSASASASTSASASTSASESASTSASASASTSASASASTSASASASTSASASASTSASASASTSASASASTSASASASTSASASASTSASASASTSASASASTSASASASTSASESASTSASASASTSASASASTSASASASTSASVSASTSASESASTSASASASTSASASASTSASASASTSASESASTSASASASTSASASASTSASESASTSASASASTSASASASTSASASASTSASASASASTSASASASTSASASASTSASASASISASESASTSASASASASTSASASASTSASASASTSASASASISASESASTSASESASTSTSASASTSASESASTSASASASTSASASASTSASASASTSASASTSASESASTSASASASTSASASASTSASASASTSASASASTSASASASTSASVSASTSASASASTSASASASTSASESASTSASASTSASESASTSASASASTSASASASTSASASASTSASESASTSASASASTSASASASTSASESASTSASASASTSASASASTSASASASTSASESASTSASASASTSASESASTSASASASTSASASASTSASGSASTSTSASASTSASASASTSASASASISASESASTSASESASTSTSASASTSASESASTSASASASTSASASASTSASASASTSASASTSASESASTSASASASTSASASASTSASASASTSASASASTSASVSASTSASASASTSASASASTSASESASTSASASASTSASASASTSASASASTSASASASTSASASASTSASESASTSASASASTSASASASTSASASASTSASASASTSASASASISASESASTSASASASTSASASASTSASASASTSASESASTSASASASTSASASASTSASASASTSASASASTSASASASTSASASASTSASESASTSASASASTSASESASTSASASASTSASASASTSASASASTSASASASTSASASASTSASASASTSASASTSASESASTSASASASTSASASASTSASASASTSASESASTSASASASTSASASASTSASASASTSASASASTSASASASISASESASTSASASASTSASVSASTSASASASTSASESASTSASASASTSASESASTSASASASTSASASASISASESASTSASASASTSASASASTSASASASTSASESASTSTSASASTSASESASTSASASASTSASASASTSASASASTSASASASTSASASTSASESASTSASASASTSASASASTSASASASTSASASASTSASASASTSASASASTSASASASTSASASASTSASESASTSASASASTSASASASTSASASASTSASASASTSASVSASTSASESASTSASASASTSASASASTSASESASTSASASASTSASESASTSASASASTSASASASTSASASASTSASASASTSASASASTSASASASTSASASASTSASASASTSASASASTSASASASTSASASASTSASASASTSASASASISASESASTSASASASTSASASASTSASVSASTSASASASTSASASASISASESASTSASASASTSASASASTSASASASTSASASASISASESASTSASASASTSASASASTSASASASTSASASASTSASASASTSASASASTSASASASTSASASASTSASASASTSASESASTSASASASTSASASASISASESASTSASASASTSASASASTSASASASTSASESASTSTSASASTSASESASTSASASASTSASASASTSASASASTSASASASTSASASTSASESASTSASASASTSASASASTSASASASTSASASASTSASASASTSASASASTSASASASTSASASASTSASESASTSASASASTSASASASTSASASASTSASASASTSASVSASTSASESASTSASASASTSASASASTSASESASTSASASASTSASESASTSASASASTSASASASTSASASASTSASASASTSASASASTSASASASTSASASASTSASASASTSASASASTSASASASTSASASASTSASASASTSASASASISASESASTSASASASTSASASASTSASVSASTSASASASTSASASASISASESASTSASASASTSASASASTSASASASTSASASASISASESASTSASASASTSASASASTSASASASTSASASASTSASASASTSASASASTSASASASTSASASASTSASASASTSASASASTSASASASTSASASASTSASASASTSASASASTSVSNSANHSNSQVGNTSGSTGKSQKELPNTGTESSIGSVLLGVLAAVTGIGLVAKRRKRDEEE

SEQ ID NO: 98 - protein, 202 aa, Streptococcus pneumoniae
MSNEKNTNTNVEKKDATVVAHEIKGELTYEDKVIQKIIGLSLENVSGLLGIDGGFFSNLKEKIVNSDDVTSGVNVEVGKTQVAVDLNVIVEYQKNVPALYSEIREIVSSEVAKMTDLEIVEINVNVVDIKTKEQHEADSVSLQDRVSDVAESTGEFTSEQFEKAKSGLGSGFSTVQEKVSEGVEAVKGAANGVVSHENTRVN

SEQ ID NO: 99 - protein, 355 aa, Streptococcus pneumoniae
MTKEKNVILTARDIVVEFDVRDKVLTAIRGVSLELVEGEVLALVGESGSGKSVLTKTFTGMLEENGRIAQGSIDYRGQDLTALSSHKDWEQIRGAKIATIFQDPMTSLDPIKTIGSQITEVIVKHQGKTAKEAKELAIDYMNKVGIPDADRRFNEYPFQYSGGMRQRIVIAIALACRPDVLICDEPTTALDVTIQAQIIDLLKSLQNEYHFTTIFITHDLGVVASIADKVAVMYAGEIVEYGTVEEVFYDPRHPYTWSLLSSLPQLADDKGDLYSIPGTPPSLYTDLKGDAFALRSDYAMQIDFEQKAPQFSVSETHWAKTWLLHEDAPKVEKPAVIANLHDKIREKMGFAHLAD

SEQ ID NO: 100 - protein, 659 aa, Streptococcus pneumoniae
MKKNRVFATAGLVLLAAGVLAACSSSKSSDSSAPKAYGYVYTADPETLDYLISSKNSTTVVTSNGIDGLFTNDNYGNLAPAVAEDWEVSKDGLTYTYKIRKGVKWFTSDGEEYAEVTAKDFVNGLKHAADKKSEAMYLAENSVKGLADYLSGTSTDFSTVGVKAVDDYTLQYTLNQPEPFWNSKLTYSIFWPLNEEFETSKGSDFAKPTDPTSLLYNGPFLLKGLTAKSSVEFVKNEQYWDKENVHLDTINLAYYDGSDQESLERNFTSGAYSYARLYPTSSNYSKVAEEYKDNIYYTQSGSGIAGLGVNIDRQSYNYTSKTTDSEKVATKKALLNKDFRQALNFALDRSAYSAQINGKDGAALAVRNLFVKPDFVSAGEKTFGDLVAAQLPAYGDEWKGVNLADGQDGLFNADKAKAEFAKAKKALEADGVQFPIHLDVPVDQASKNYISRIQSFKQSVETVLGVENVVVDIQQMTSDEFLNITYYAANASSEDWDVSGGVSWGPDYQDPSTYLDILKTTSSETTKTYLGFDNPNSPSVVQVGLKEYDKLVDEAARETSDLNVRYEKYAAAQAWLTDSSLFIPAMASSGAAPVLSRIVPFTGASAQTGSKGSDVYFKYLKSQDKVVTKEEYEKAREKWLKEKAESNEKAQKELASHVK

SEQ ID NO: 101 - protein, 467 aa, Streptococcus pneumoniae
MKKKYWTLAILFFCLFNNSVTAQEIPKNLDGNITHTQTSESFSESDEKQVDYSNKNQEEVDQNKFRIQIDKTELFVTTDKHLEKNCCKLELEPQINNDIVNSESNNLLGEDNLDNKIKENVSHLDNRGGNIEHDKDNLESSIVRKYEWDIDKVTGGGESYKLYSKSNSKVSIAILDSGVDLQNTGLLKNLSNHSKNYVPNKGYLGKEEGEEGIISDIQDRLGHGTAVVAQIVGDDNINGVNPHVNINVYRIFGKSSASPDWIVKAIFDAVDDGNDIINLSTGQYLMIDGEYEDGTNDFETFLKYKKAIDYANQKGVIIVAALGNDSLNVSNQSDLLKLISSRKKVRKPGLVVDVPSYFSSTISVGGIDRLGNLSDFSNKGDSDAIYAPAGSTLSLSELGLNNFINAEKYKEDWIFSATLGGYTYLYGNSFAAPKVSGAIAMIIDKYKLKDQPYNYMFVKKFWKKHYQ

SEQ ID NO: 102 - protein, 308 aa, Streptococcus pneumoniae
MKKDELFEGFYLIKSADLRQTRAGKNYLAFTFQDDSGEIDGKLWDAQPHNIEAFTAGKVVHMKGRREVYNNTPQVNQITLRLPQAGEPNDPADFKVKSPVDVKEIRDYMSQMIFKIENPVWQRIVRNLYTKYDKEFYSYPAAKTNHHAFETGLAYHTATMVRLADAISEVYPQLNKSLLYAGIMLHDLAKVIELTGPDQTEYTVRGNLLGHIALIDSEITKTVMELGIDDTKEEVVLLRHVILSHHGLLEYGSPVRPRIMEAEIIHMIDNLDASMMMMSTALALVDKGEMTNKIFAMDNRSFYKPDLD

SEQ ID NO: 103 - protein, 221 aa, Streptococcus pneumoniae
VTILGKDTVQQSAKGESVTQEATPEYKLENTPGGDKGGNTGSSDANANEGGGSQAGGSAHTGSQNSAQSQASKQLATEKESAKNAIEKAAKDKQDEIKGAPLSDKEKAELLARVEAEKQAALKEIENAKTMEDVKEAETIGVQAIAMVTVPKRPVAPNAAPKTTSAPQATAGTMQDVTYQSPAGKQLPNTGSASSAALASLGLVVATSGFALLGRKTRRRK

SEQ ID NO: 104 - protein, 336 aa, Streptococcus pneumoniae
MNADDTVTIYDVAREAGVSMATVSRVVNGNKNVKENTRKKVLEVIDRLDYRPNAVARGLASKKTTTVGVVIPNITNGYFSSLAKGIDDIAEMYKYNIVLANSDEDNEKEVSVVNTLFSKQVDGIIYMGYHLTDKIRSEFSRSRTPIVLAGTVDVEHQLPSVNIDYKQATIDAVSYLAKENERIAFVSGPLVDDINGKVRLVGYKETLKKAGITYSEGLVFESKYSYDDGYALAERLISSNATAAVVTGDELAAGVLNGLADKGVSVPEDFEIITSDDSQISRFTRPNLTTIAQPLYDLGAISMRMLTKIMHKEELEEREVLLPHGLTERSSTRKRK

SEQ ID NO: 105 - protein, 469 aa, Streptococcus pneumoniae
MKKKLVFPNLFWWGAASSGPQTEGQYGKVHENVMDYWFKTHPEDFFDNVGPLVASNFFHTYTEDFHLMKEIGVNSFRTSIQWSRLIKNLETGEPDPKGIAFYNAIIEEAKKNQMDLVMNLHHFDLPVELLQKYGGWESKHVVELFVKFAKTAFTCFGDKVHYWTTFNEPMVIPEAGYLYAFHYPNLKGKGKEAVQVIYNLNLASAKVIQLYRSLELDGKIGIILNLTPAYPRSNSPEDLEASRFTDDFFNKVFLNPAVKGTFPERLVKQLERDGVLWSHTEKELQLMKSNTVDFLGVNYYHPKRVQAQANPEEYQTPWMPDQYFKEYEWLERRMNPYRGWEIFPKAIYDIAMIVKEEYGNIPWFISENGMGVENEARFIDENGVIDDVYRIEFYEEHLRWLHKAIEEGSHCFGYHAWTAFDCWSWNNAYKNRYGFISVDLETQKRTIKSSGRWYRKVSDNNGFEVEIEE

SEQ ID NO: 106 - protein, 136 aa, Streptococcus pneumoniae
VENLTNFYEKYRVYLTRPRLELLAVVTIVFCAVLVFFLNIPGKGVLKLDNGTIVYDGSLVRGKMNGQGTITFQNGDQYTGGFNNGAFNGKGTFQSKEGWTYEGDFVNGQAEGKGKLTTEQEVVYEGTFKQGVFQQK

SEQ ID NO: 107 - protein, 207 aa, Streptococcus pneumoniae
MLNKIRDYLDFAGLQYRNPDKAGAEREKMLAFRHKGQEARKVFTELAKAFQASHPEWQLQQTSQWMNQAQRLRPHFWVYLQRDGQVTEPMMALRLYGTSTDFGISLEVSFIERKKDEQTLGKQAKVLDIPTVKGIYYLTYSNGQSQRWEANEEKRRTLREKVRSQEVRKVLVKVDVPMTENSSEEEIVEGLLKSYSKILPYYLATRK

SEQ ID NO: 108 - protein, 152 aa, Streptococcus pneumoniae
MVQNSCWQSKSHKVKAFTLLESLLALIVISGGLLLFQAMSQLLISEVRYQQQSEQKEWLLFVDQLEVELDRSQFEKVEGNRLYMKQDGKDIAIGKSKSDDFRKTNARGRGYQPMVYGLKSVRITEDNQLVRFHFQFQKGLEREFIYRVEKEK

SEQ ID NO: 109 - protein, 108 aa, Streptococcus pneumoniae
MKKMMTFLKKAKVKAFTLVEMLVVLLIISVLFLLFVPNLTKQKEAVNDKGKAAVVKVVESQAELYSLEKNEDASLRKLQADGRITEEQAKAYKEYNDKNGGANRKVND

SEQ ID NO: 110 - protein, 299 aa, Streptococcus pneumoniae
MTSKVRKAVIPAAGLGTRFLPATKALAKEMLPIVDKPTIQFIVEEALKSGIEDILVVTGKSKRSIEDHFDSNFELEYNLKEKGKTDLLKLVDKTTDMRLHFIRQTHPRGLGDAVLQAKAFVGNEPFVVMLGDDLMDITDEKAVPLTKQLMDDYERTHASTIAVMPVPHDEVSAYGVIAPQGEGKDGLYSVETFVEKPAPEDAPSDLAIIGRYLLTPEIFEILEKQAPGAGNEIQLTDAIDTLNKTQRVFAREFKGARYDVGDKFGFMKTSIDYALKHPQVKDDLKNYLIQLGKELTEKE

SEQ ID NO: 111 - protein, 821 aa, Streptococcus pneumoniae
MQNQLNELKRKMLEFFQQKQKNKKSARPGKKGSSTKKSKTLDKSVIFPAILLSIKALFNLLFVLGFLGGMLGAGIALGYGVALFDKVRVPQTEELVNQVKDISSISEITYSDGTVIASIESDLLRTSISSEQISENLKKAIIATEDEHFKEHKGVVPKAVIRATLGKFVGLGSSSGGSTLTQQLIKQQVVGDAPTLARKAAEIVDALALERAMNKDEILTTYLNVAPFGRNNKGQNIAGARQAAEGIFGVDASQLTVPQAAFLAGLPQSPITYSPYENTGELKSDEDLEIGLRRAKAVLYSMYRTGALSKDEYSQYKDYDLKQDFLPSGTVTGISRDYLYFTTLAEAQERMYDYLAQRDNVSAKELKNEATQKFYRDLAAKEIENGGYKITTTIDQKIHSAMQSAVADYGYLLDDGTGRVEVGNVLMDNQTGAILGFVGGRNYQENQNNHAFDTKRSPASTTKPLLAYGIAIDQGLMGSETILSNYPTNFANGNPIMYANSKGTGMMTLGEALNYSWNIPAYWTYRMLREKGVDVKGYMEKMGYEIPEYGIESLPMGGGIEVTVAQHTNGYQTLANNGVYHQKHVISKIEAADGRVVYEYQDKPVQVYSKATATIMQGLLREVLSSRVTTTFKSNLTSLNPTLANADWIGKTGTTNQDENMWLMLSTPRLTLGGWIGHDDNHSLSRRAGYSNNSNYMAHLVNAIQQASPSIWGNERFALDPSVVKSEVLKSTGQKPEKVSVEGKEVEVTGSTVTSYWANKSGAPATSYRFAIGGSDADYQNAWSSIVGSLPTPSSSSSSSSSSSDSSNSSTTRPSSSRARR

SEQ ID NO: 112 - protein, 423 aa, Streptococcus pneumoniae
MSSKFMKSAAVLGTATLASLLLVACGSKTADKPADSGSSEVKELTVYVDEGYKSYIEEVAKAYEKEAGVKVTLKTGDALGGLDKLSLDNQSGNVPDVMMAPYDRVGSLGSDGQLSEVKLSDGAKTDDTTKSLVTAANGKVYGAPAVIESLVMYYNKDLVKDAPKTFADLENLAKDSKYAFAGEDGKTTAFLADWTNFYYTYGLLAGNGAYVFGQNGKDAKDIGLANDGSIVGINYAKSWYEKWPKGMQDTEGAGNLIQTQFQEGKTAAIIDGPWKAQAFKDAKVNYGVATIPTLPNGKEYAAFGGGKAWVIPQAVKNLEASQKFVDFLVATEQQKVLYDKTNEIPANTEARSYAEGKNDELTTAVIKQFKNTQPLPNISQMSAVWDPAKNMLFDAVSGQKDAKTAANDAVTLIKETIKQKFGE

SEQ ID NO: 113 - protein, 155 aa, Streptococcus pneumoniae
MIDKVVRNLLLTFFFCKMTKIIIFLTTILVKKKKICYNEFKLRNRKQKGVIMWVLGFILFMIFFYSNNSKKIKKLENKIKRLERKEKGNAEMSRLLQEMIGKEPIITGVYIGPDNWEVVDVDEEWVKLRRVDNTGKEKFKLQRIEDIQTVEFDGE

SEQ ID NO: 114 - protein, 285 aa, Streptococcus pneumoniae
MILSKNREDGLRKFATNIRLNTLRTLNHLGFGHYGGSLSIVEVLAVLYGEIMPMTPEIFAARDRDYFILSKGHGGPALYSTLYLNGFFDKEFLYSLNTNGTKLPSHPDRNLTPGIDMTTGSLGQGISVATGLAYGQRIRKSPFYTYAIVGDGELNEGQCWEAIQFASHQQLSNLIVFVDDNKKQLDGFTKDICNPGDFVEKFSAFGFESIRVKGSDIREIYEGIVQLKQSNNSSPKCIVLDTIKGQGVQELEEMKSNHHLRPTVEEKQMLTSVVERLSQELEETE

SEQ ID NO: 115 - protein, 621 aa, Streptococcus pneumoniae
MKKTTILSLTTAAVILAAYVPNEPILADTPSSEVIKETKVGSIIQQNNIKYKVLTVEGNIGTVQVGNGVTPVEFEAGQDGKPFTIPTKITVGDKVFTVTEVASQAFSYYPDETGRIVYYPSSITIPSSIKKIQKKGFHGSKAKTIIFDKGSQLEKIEDRAFDFSELEEIELPASLEYIGTSAFSFSQKLKKLTFSSSSKLELISHEAFANLSNLEKLTLPKSVKTLGSNLFRLTTSLKHVDVEEGNESFASVDGVLFSKDKTQLIYYPSQKNDESYKTPKETKELASYSFNKNSYLKKLELNEGLEKIGTFAFADAIKLEEISLPNSLETIERLAFYGNLELKELILPDNVKNFGKHVMNGLPKLKSLTIGNNINSLPSFFLSGVLDSLKEIHIKNKSTEFSVKKDTFAIPETVKFYVTSEHIKDVLKSNLSTSNDIIVEKVDNIKQETDVAKPKKNSNQGVVGWVKDKGLWYYLNESGSMATGWVKDKGLWYYLNESGSMATGWVKDKGLWYYLNESGSMATGWVKDKGLWYYLNESGSMATGWVKDKGLWYYLNESGSMATGWVKDKGLWYYLNESGSMATGWVTVSGKWYYTYNSGDLLVNTTTPDGYRVNANGEWVG

SEQ ID NO: 116 - protein, 626 aa, Streptococcus pneumoniae
MVRFTGLSLKQTQAIEVLKGHISLPDVEVAVTQSDQASISIEGEEGHYQLTYRKPHQLYRALSLLVTVLAEADKVEIEEQAAYEDLAYMVDCSRNAVLNVASAKQMIEILALMGYSTFELYMEDTYQIEGQPYFGYFRGAYSAEELQEIEAYAQQFDVTFVPCIQTLAHLSAFVKWGVKEVQELRDVEDILLIGEEKVYDLIDGMFATLSKLKTRKVNIGMDEAHLVGLGRYLILNGVVDRSLLMCQHLERVLDIADKYGFHCQMWSDMFFKLMSADGQYDRDVEIPEETRVYLDRLKDRVTLVYWDYYQDSEEKYNRNFRNHHKISHDLAFAGGAWKWIGFTPHNHFSRLVAIEANKACRANQIKEVIVTGWGDNGGETAQFSILPSLQIWAELSYRNDLDGLSAHFKTNTGLTVEDFMQIDLANLLPDLPGNLSGINPNRYVFYQDILCPILDQHMTPEQDKPHFAQAAETLANIKEKAGNYAYLFETQAQLNAILSSKVDVGRRIRQAYQADDKESLQQIARQELPELRSQIEDFHALFSHQWLKENKVFGLDTVDIRMGGLLQRIKRAESRIEVYLAGQLDRIDELEVEILPFTDFYADKDFAATTANQWHTIATASTIYTT

SEQ ID NO: 117 - protein, 782 aa, Streptococcus pneumoniae
MSNSFVKLLVSQLFANLADIFFRVTIIANIYIISKSVIATSLVPILIGISSFVASLLVPLVTKRLALNRVLSLSQFGKTILLAILVGMFTVMQSVAPLVTYLFVVAISILDGFAAPVSYAIVPRYATDLGKANSALSMTGEAVQLIGWGLGGLLFATIGLLPTTCINLVLYIISSFLMLFLPNAEVEVLESETNLEILLKGWKLVARNPRLRLFVSANLLEIFSNTIWVSSIILVFVTELLNKTESYWGYSNTAYSIGIIISGLIAFRLSEKFLAAKWEPQLFTPNLKTIQNPCLSLDPGWFLFSPNGCFLLDKKEFPLYGISVEKNTKRKETHMNSLPNHHFQNKSFYQLSFDGGHLTQYGGLIFFQELFSQLKLKERISKYLVTNDQRRYCRYSDSDILVQFLFQLLTGYGTDYACKELSADAYFPKLLEGGQLASQPTLSRFLSRTDEETVHSLRCLNLELVEFFLQFHQLNQLIVDIDSTHFTTYGKQEGVAYNAHYRAHGYHPLYAFEGKTGYCFNAQLRPGNRYCSEEADSFITPVLERFNQLLFRMDSGFATPKLYDLIEKTGQYYLIKLKKNTVLSRLGDLSLPCPQDEDLTILPHSAYSETLYQAGSWSHKRRVCQFSERKEGNLFYDVISLVTNMTSGTSQDQFQLYRGRGQAENFIKEMKEGFFGDKTDSSTLIKNEVRMMMSCIAYNLYLFLKHLAGGDFQTLTIKRFRHLFLHVVGKCVRTGRKQLLKLSSLYAYSELFSALYSRIRKVNLNLPVPYEPPRRKASLMMH

SEQ ID NO: 118 - protein, 810 aa, Streptococcus pneumoniae
MNYSKALNECIESAYMVAGHFGARYLESWHLLIAMSNHSYSVAGATLNDYPYEMDRLEEVALELTETDYSQDETFTELPFSRRLQVLFDEAEYVASVVHAKVLGTEHVLYAILHDSNALATRILERAGFSYEDKKDQVKIAALRRNLEERAGWTREDLKALRQRHRTVADKQNSMANMMGMPQTPSGGLEDYTHDLTEQARSGKLEPVIGRDKEISRMIQILSRKTKNNPVLVGDAGVGKTALALGLAQRIASGDVPAEMAKMRVLELDLMNVVAGTRFRGDFEERMNNIIKDIEEDGQVILFIDELHTIMGSGSGIDSTLDAANILKPALARGTLRTVGATTQEEYQKHIEKDAALSRRFAKVTIEEPSVADSMTILQGLKATYEKHHRVQITDEAVETAVKMAHRYLTSRHLPDSAIDLLDEAAATVQNKAKHVKADDSDLSPADKALMDGKWKQAAQLIAKEEEVPVYKDLVTESDILTTLSRLSGIPVQKLTQTDAKKYLNLEAELHKRVIGQDQAVSSISRAIRRNQSGIRSHKRPIGSFMFLGPTGVGKTELAKALAEVLFDDESALIRFDMSEYMEKFAASRLNGAPPGYVGYEEGGELTEKVRNKPYSVLLFDEVEKAHPDIFNVLLQVLDDGVLTDSKGRKVDFSNTIIIMTSNLGATALRDDKTVGFGAKDIRFDQENMEKRMFEELKKAYRPEFINRIDEKVVFHSLSSDHMQEVVKIMVKPLVASLTEKGIDLKLQASALKLLANQGYDPEMGARPLRRTLQTEVEDKLAELLLKGDLVAGSTLKIGVKAGQLKFDIA

SEQ ID NO: 119 - protein, 448 aa, Streptococcus pneumoniae
MKILPFIARGTSYYLKMSVKKLVPFLVVGLMLAAGDSVYAYSRGNGSIARGDDYPAYYKNGSQEIDQWRMYSRQCTSFVAFRLSNVNGFEIPAAYGNANEWGHRARREGYRVDNTPTIGSITWSTAGTYGHVAWVSNVMGDQIEIEEYNYGYTESYNKRVIKANTMTGFIHFKDLDGGSVGNSQSSTSTGGTHYFKTKSAIKTEPLASGTVIDYYYPGEKVHYDQILEKDGYKWLSYTAYNGSYRYVQLEAVNKNPLGNSVLSSTGGTHYFKTKSAIKTEPLVSATVIDYYYPGEKVHYDQILEKDGYKWLSYTAYNGSRRYIQLEGVTSSQNYQNQSGNISSYGSHSSSTVGWKKINGSWYHFKSNGSKSTGWLKDGSSWYYLKLSGEMQTGWLKENGLWYYLGSSGAMKTGWYQVSGKWYYSYSSGALAVNTTVDGYRVNSDGERV

SEQ ID NO: 120 - protein, 150 aa, Streptococcus pneumoniae
MKVIFLADVKGKGKKGEIKEVPTGYAQNFLIKKNLAKEATAQAVGELRGKQKSEEKAHAEMIAEGKAIKAQLEAEETVVEFVEKVGPDGRTFGSITNKKIAEELQKQFGIKIDKRHIQVQAPIRAVGLIDVPVKIYQDITSVINLRVKEG

SEQ ID NO: 121 - protein, 363 aa, Streptococcus pneumoniae
MSEIEIINAKKIYHDVPVIENLNITIPKGSLFTLLGASGCGKTTLLRMIAGFNSIKDGEFYFDDTKINNMEPSKRNIGLVFQNYAIFPHLTVRDNVAFGLMQKKVPKEELIQQTNKYLELMQIAQYADRKPDKLSGGQQQRVTLACALAVNPSVLLMDEPLSNLEAKLRLDMRQTIREIQHEVGITTVYVTHDQEEAMAISDQIAVMKDGVIQQIGRPKELYHKPANEFVATFIGRTNIIPANLEKRSDGAYIVFSDGYALRMPALDQVEEQAIHVSIRPEEFIKDESGDIEGTIRDSVYLGLNTDYFIETGFASKIQVSEESTFEEELQKGNRIRLRINTQKLNIFSADGSQNLIKGVNHGT

SEQ ID NO: 122 - protein, 129 aa, Streptococcus pneumoniae
MVKRRIRRGTREPEKVVVPEQSSIPSYPVSVTSNQGTDVAVEPAKAVAPTTDWKQENGMWYFYNTDGSMATGWVQVNSSWYYLNSNGSMKVNQWFQVGGKWYYVNTSGELAVNTSIDGYRVNDNGEWVR

SEQ ID NO: 123 - protein, 46 aa, Streptococcus pneumoniae
ELRRLSRLVDQELYFGCGWRLSLEWLPSMRKDSWPSNTAPRTTMVQ

SEQ ID NO: 124 - protein, 31 aa, Streptococcus pneumoniae
DCIRKQPFTRDEPNKTCRKTKPSKSYCSYRW

SEQ ID NO: 125 - protein, 26 aa, Streptococcus pneumoniae
GQRNPRRIERVIRMAETKPRISKKEG

SEQ ID NO: 126 - protein, 83 aa, Streptococcus pneumoniae
QRKLFKIFHLFQKKSGWNQKSSCLKLNLNSLNRKMTQMTKMFRSIFQPKKPLNTNFQAYNSLHQINQKISLKRRKLSEKISKS

SEQ ID NO: 127 - protein, 104 aa, Streptococcus pneumoniae
LVIIVLKIQSKSETDFIFKTWPFILLSKIIPLMVLDCQVSISWTNRETVAYSKLLAIKTLKGDYHDGQSKKIRLSHASRVRTPSWYPHDMADSTRIMAFSRKGC

SEQ ID NO: 128 - protein, 30 aa, Streptococcus pneumoniae
ERLPAFPRSLSGRKLDQGGTKEKGSDGRSP

SEQ ID NO: 129 - protein, 245 aa, Streptococcus pneumoniae
RNCLSTWKSSSNYHTEIKRGTVRQCLGKGRFKEVYSADYAQQSYENNRKRSVKKSSLTKELKEKILHYHNQKFSPEMMVMAKGVNVGISTIYYWIHHGKLGLSKQDLLYPRKGKALKKQASTNFKPAGQSIEQRPEAINLRLENGHYEIDTVLLTRSKNYCLIVLTDRKSRHQIIRLIPNKSAEVVNQALKLILKQHKILSITADNGTEFNRLFDIFSEEHIYYAHPYASWERGTNENHNRLIRR

SEQ ID NO: 130 - protein, 36 aa, Streptococcus pneumoniae
PVMTISSPTMKNMDLSTKASPSQPLQGKHGMIWSGK

SEQ ID NO: 131 - protein, 28 aa, Streptococcus pneumoniae
TSSIRIHTRKSSPNWTTTPHLALSAETN

SEQ ID NO: 132 - protein, 27 aa, Streptococcus pneumoniae
YFLPHKYARESLSLPSTNKILHRKQGS

SEQ ID NO: 133 - protein, 53 aa, Streptococcus pneumoniae
AAFKKDQINERVEKLGKLKPITINYNGKSEVIDSKEKLQELMNKAVKDEVAQI

SEQ ID NO: 134 - protein, 33 aa, Streptococcus pneumoniae
AYAHSKRSAGSGRAGGRQCLCQCQNKCRRDFKY

SEQ ID NO: 135 - protein, 36 aa, Streptococcus pneumoniae
HGRPYHKPHQPHHHGFPQQSYNLLPPKHKPTLCVRR

SEQ ID NO: 136 - protein, 130 aa, Streptococcus pneumoniae
KGKILLLPRLTTQRWQRKIRPDSRKSANNKANLDFHNSRCKSSLSDEAPNLHKNPALLVHSLSRVIAVLLELSPLQAYSIVKFSPKEDDLIHDDAILVRFGILEVHDSPYELLLLYHTHSYRFSCSIYLS

SEQ ID NO: 137 - protein, 144 aa, Streptococcus pneumoniae
FTVSHVFLLYLSFNPRPKSMSLSFTSSKLLRPRFRTFIISASDFSVKSCTVLIPARFKQLYERTDKSSSSIVRSKIRSSDSVSASFITSVDLAISVRFVNKSRCSVKIRAESPKASSGIIVPFVKISRVNLSKPSLLPTRAGST

SEQ ID NO: 138 - protein, 18 aa, Streptococcus pneumoniae
LVCMKNKGCYKERNNCCH

SEQ ID NO: 139 - protein, 58 aa, Streptococcus pneumoniae
FHYLSKYFLVSAITTGDKTKRAIKFGRAIKALTISAIIQTISNSINPPNKTMSTKTTR

SEQ ID NO: 140 - protein, 47 aa, Streptococcus pneumoniae
GKKVFIKYPLSRVSSKTGPMITGRTKDKIVDKKVGCPFEKSTVKYSS

SEQ ID NO: 141 - protein, 37 aa, Streptococcus pneumoniae
SSPVFPKLVMVSGANKPRERRNFPFSSKMSFHLTFVL

SEQ ID NO: 142 - protein, 77 aa, Streptococcus pneumoniae
YLTSFSVPKIASSKVKLTRYWRSSPWRGAFGLREEPPPPKKLEKISSKPPKPPAPLKPPKPPAPPKPPLAPAAPYWS

SEQ ID NO: 143 - protein, 89 aa, Streptococcus pneumoniae
QSWRPIPDSKCYTQEKLTIPIKRRKDIKDFYHNSIQRHKNSHKSHLLDSYRLIITRLAEIVHENKILIVLILYVTNIPSRSRRYEVNRV

SEQ ID NO: 144 - protein, 60 aa, Streptococcus pneumoniae
LFRFYRVIVLYRGWHIYLLILVNLQYVQNVFRKDRFLVRGAQPFFHGERSAGHLVLPYVL

SEQ ID NO: 145 - protein, 60 aa, Streptococcus pneumoniae
ITHPPLNPEHFVSRVFSSLGLKSYQPKDDRFLRKPSDSRHPESGNSGKWQVLNSPLVIVK

SEQ ID NO: 146 - protein, 30 aa, Streptococcus pneumoniae
TLAKAVGLMYSPPIPPKPFLGRITTDSSSI

SEQ ID NO: 147 - protein, 83 aa, Streptococcus pneumoniae
PGSPFSEISGAGFFGVAKRIFPRPPRPPWATINSCPCSIKSVKTLPVSASRTVVPCGTRTLRSSAPRPCIPLVIPFSPESALK

SEQ ID NO: 148 - protein, 111 aa, Streptococcus pneumoniae
INSLTLATSLSKRRAPRKASKASPRMVSRLRPPDFSSPLPNLINWSNWQSRAKPAKLSSRTIIARSFDRSPSGFLGYFLYRYSEINNCRTASPKNSKRSLCEIFKRRCSLA

SEQ ID NO: 149 - protein, 49 aa, Streptococcus pneumoniae
PIGKRNCKAECQSHHLLEKQKTFQSRKTKRYGASPEPRYRESRKPRLSQ

SEQ ID NO: 150 - protein, 58 aa, Streptococcus pneumoniae
QPLGHSKAEEHETICSHTFDNHTTETIPNQVKGRDMTSSETLPFPSKNQNQGKAKQIP

SEQ ID NO: 151 - protein, 125 aa, Streptococcus pneumoniae
PCSLPDYGLVGSGYHSCHYQSNDTRFLESHGNWRTLLYSWSWILCQEKTLFPHDLASLYPSCVRTSIHRYCLLHVKKLRNSISTFFFTHIDKVLVQAHIISQFWMKRTYQHIFFLGCNNLIVHCC

SEQ ID NO: 152 - protein, 69 aa, Streptococcus pneumoniae
RVKDNHLDKLVKALLKRRSSTQYYIHQLLRKMIRLYGHQQLHNNSEILVYSDYGHVDLLLLETNKIPVY

SEQ ID NO: 153 - protein, 40 aa, Streptococcus pneumoniae
QVIKIDIATTNKTESVKSQSEREKKRLTSSNILKVRGRPI

SEQ ID NO: 154 - protein, 32 aa, Streptococcus pneumoniae
AFKSSKVPSLDPSSTKTYSISVSKSGSKASRA

SEQ ID NO: 155 - protein, 69 aa, Streptococcus pneumoniae
DKTDPLARKLPDKSKPSTSFCTKSLSPVNMASLTSAKPSKTKASLGICSPADKRMTSPSTNSSGLRATS

SEQ ID NO: 156 - protein, 38 aa, Streptococcus pneumoniae
LCRLQTQARPRGSVTNLTKQNKVYRYLNYLRQTQLSAM

SEQ ID NO: 157 - protein, 110 aa, Streptococcus pneumoniae
CIQSIGNEGQCKGNSCYVGKEIHLAPISDIVGHKGKEEGDDGNDDGRQFYLFLAHLVGSAFLRSFPLLYSKGINEEGDGIGNDGRLISKDIINSTGQNGINNTKVISPFA

SEQ ID NO: 158 - protein, 121 aa, Streptococcus pneumoniae
TSTKLVIDTTTFMTFCTNNTKSSKFTNTFTKLDVGTTTRHVGCDGNGTTLTSIHDDLGFSIVVFGIQDFVRNTSCNQFLRNVVTSFNRYCTNQDRLTLLVTSLNVFDNRFKLRFDTCIKKV

SEQ ID NO: 159 - protein, 27 aa, Streptococcus pneumoniae
ISTGVPTCSMYPLLKTAILSDKVKASS

SEQ ID NO: 160 - protein, 34 aa, Streptococcus pneumoniae
LSTMSSIKSILCSLPTHTIFSKSAISPKRGSTAI

SEQ ID NO: 161 - protein, 111 aa, Streptococcus pneumoniae
SCSYSSTNSKACSIVGLSKPTIFICVTPISAAKAISSASRPANSSTFKCVCVSKIISSNLVFYLLLYQKRGGAPNFSVSPPLFNRELFCYLFYPILPISYSTVRDRRDWLH

SEQ ID NO: 162 - protein, 110 aa, Streptococcus pneumoniae
VTSCIVPAVACGALVVLGAALGATGLLGTVTMAMACTPIVSASFTSSIVFAFSISLRAACFSASTLAKSSAFSLSESGAPLISSCLSLAAFSMAFLADSFSVANCLEACD

SEQ ID NO: 163 - protein, 53 aa, Streptococcus pneumoniae
YSPFNHSILIRKTTKIINPNPKAPRMNWRSKVWSNQPVNISTNHTKSDRPIKK

SEQ ID NO: 164 - protein, 48 aa, Streptococcus pneumoniae
DYFKFRTTFTRFSTVKPYSANTFGAGAEAPKVSIPRTAPSRPTYLYQF

SEQ ID NO: 165 - protein, 74 aa, Streptococcus pneumoniae
RGRRGLCVARIKAPRLVIKPKRTIDPPTKDRYSPPLSATSLSVPKSPIISFPAKMDKNPKRKLNSKVIFNASVT

SEQ ID NO: 166 - protein, 30 aa, Streptococcus pneumoniae
TPPYTKIPAKTAIIPFISAQDFNQAQRLSG

SEQ ID NO: 167 - protein, 279 aa, Streptococcus pneumoniae
MGIALENVNFIYQEGTPLASAALSDVSLTIEDGSYTALIGHTGSGKSTILQLLNGLLVPSQGSVRVFDTLITSTSKNKDIRQIRKQVGLVFQFAENQIFEETVLKDVAFGPQNFGVSEEDAVKTAREKLALVGIDESLFDRSPFELSGGQMRRVAIAGILAMEPSILVLDEPTAGLDPLGRKELMTLFKKLHQSGMTIVLVTHLMDDVAEYANQVYVMEKGRLVKGGKPSDVFQDVVFMEEVQLGVPKITAFCKRLADRGVSFKRLPIKIEEFKESLNG

SEQ ID NO: 168 - protein, 132 aa, Streptococcus pneumoniae
MVMTDPIADFLTRIRNANQAKHEVLEVPASNIKKGIAEILKREGFVKNVEIIEDDKQGVIRVFLKYGPNGEKVITNLKRVSKPGLRVYKKREDLPKVLNGLGIAILSTSEGLLTDKEARQKNVGGEVIAYVW

SEQ ID NO: 169 - protein, 471 aa, Streptococcus pneumoniae
MANKAVNDFILAMNYDKKKLLTHQGESIENRFIKEGNQLPDEFVVIERKKRSLSTNTSDISVTATNDSRLYPGALLVVDETLLENNPTLLAVDRAPMTYSIDLPGLASSDSFLQVEDPSNSSVRGAVNDLLAKWHQDYGQVNNVPARMQYEKITAHSMEQLKVKFGSDFEKTGNSLDIDFNSVHSGEKQIQIVNFKQIYYTVSVDAVKNPGDVFQDTVTVEDLKQRGISAERPLVYISSVAYGRQVYLKLETTSKSDEVEAAFEALIKGVKVAPQTEWKQILDNTEVKAVILGGDPSSGARVVTGKVDMVEDLIQEGSRFTADHLGLPISYTTSFLRDNVVATFQNSTDYVETKVTAYRNGDLLLDHSGAYVAQYYITWNELSYDHQGKEVLTPKAWDRNGQDLTAHFTTSIPLKGNVRNLSVKIRECTGLAWEWWRTVYEKTDLPLVRKRTISIWGTTLYPQVEDKVEND

SEQ ID NO: 170 - protein, 464 aa, Streptococcus pneumoniae
MANKAVNDFILAMNYDKKKLLTHQGESIENRFIKEGNQLPDEFVVIERKKRSLSTNTSDISVTATNDSRLYPGALLVVDETLLENNPTLLAVDRAPMTYSIDLPGLASSDSFLQVEDPSNSSVRGAVNDLLAKWHQDYGQVNNVPARMQYEKITAHSMEQLKVKFGSDFEKTGNSLDIDFNSVHSGEKQIQIVNFKQIYYTVSVDAVKNPGDVFQDTVTVEDLKQRGISAERPLVYISSVAYGRQVYLKLETTSKSDEVEAAFEALIKGVKVAPQTEWKQILDNTEVKAVILGGDPSSGARVVTGKVDMVEDLIQEGSRFTADHLGLPISYTTSFLRDNVVATFQNSTDYVETKVTAYRNGDLLLDHSGAYVAQYYITWNELSYDHQGKEVLTPKAWDRNGQDLTAHFTTSIPLKGNVRNLSVKIRECTGLAWEWWRTVYEKTDLPLVRKRTISIWGTTLYPQV

SEQ ID NO: 171 - protein, 471 aa, Streptococcus pneumoniae
MANKAVNDFILAMNYDKKKLLTHQGESIENRFIKEGNQLPDEFVVIERKKRSLSTNTSDISVTATNDSRLYPGALLVVDETLLENNPTLLAVDRAPMTYSIDLPGLASSDSFLQVEDPSNSSVRGAVNDLLAKWHQDYGQVNNVPARMQYEKITAHSMEQLKVKFGSDFEKTGNSLDIDFNSVHSGEKQIQIVNFKQIYYTVSVDAVKNPGDVFQDTVTVEDLKQRGISAERPLVYISSVAYGRQVYLKLETTSKSDEVEAAFEALIKGVKVAPQTEWKQILDNTEVKAVILGGDPSSGARVVTGKVDMVEDLIQEGSRFTADHLGLPISYTTSFLRDNVVATFQNSTDYVETKVTAYRNGDLLLDHSGAYVAQYYITWNELSYDHQGKEVLTPKAWDRNGQDLTAHFTTSIPLKGNVRNLSVKIRECTGLAFEWWRTVYEKTDLPLVRKRTISIWGTTLYPQVEDKVEND

SEQ ID NO: 172 - protein, 886 aa, Streptococcus pneumoniae
MKKVRKIFQKAVAGLCCISQLTAFSSIVALAETPETSPAIGKVVIKETGEGGALLGDAVFELKNNTDGTTVSQRTEAQTGEAIFSNIKPGTYTLTEAQPPVGYKPSTKQWTVEVEKNGRTTVQGEQVENREEALSDQYPQTGTYPDVQTPYQIIKVDGSEKNGQHKALNPNPYERVIPEGTLSKRIYQVNNLDDNQYGIELTVSGKTVYEQKDKSVPLDVVILLDNSNSMSNIRNKNARRAERAGEATRSLIDKITSDSENRVALVTYASTIFDGTEFTVEKGVADKNGKRLNDSLFWNYDQTSFTTNTKDYSYLKLTNDKNDIVELKNKVPTEAEDHDGNRLMYQFGATFTQKALMKADEILTQQARQNSQKVIFHITDGVPTMSYPINFNHATFAPSYQNQLNAFFSKSPNKDGILLSDFITQATSGEHTIVRGDGQSYQMFTDKTVYEKGAPAAFPVKPEKYSEMKAAGYAVIGDPINGGYIWLNWRESILAYPFNSNTAKITNHGDPTRWYYNGNIAPDGYDVFTVGIGINGDPGTDEATATSFMQSISSKPENYTNVTDTTKILEQLNRYFHTIVTEKKSIENGTITDPMGELIDLQLGTDGRFDPADYTLTANDGSRLENGQAVGGPQNDGGLLKNAKVLYDTTEKRIRVTGLYLGTDEKVTLTYNVRLNDEFVSNKFYDTNGRTTLHPKEVEQNTVRDFPIPKIRDVRKYPEITISKEKKLGDIEFIKVNKNDKKPLRGAVFSLQKQHPDYPDIYGAIDQNGTYQNVRTGEDGKLTFKNLSDGKYRLFENSEPAGYKPVQNKPIVAFQIVNGEVRDVTSIVPQDIPAGYEFTNDKHYITNEPIPPKREYPRTGGIGMLPFYLIGCMMMGGVLLYTRKHP

SEQ ID NO: 173 - protein, 665 aa, Streptococcus pneumoniae; identical to SEQ ID NO: 56

SEQ ID NO: 174 - protein, 644 aa, Streptococcus pneumoniae
MKSINKFLTMLAALLLTASSLFSAATVFAADNVSTAPDAVTKTLTIHKLLLSEDDLKTWDTNGPKGYDGTQSSLKDLTGVVAEEIPNVYFELQKYNLTDGKEKENLKDDSKWTTVHGGLTTKDGLKIETSTLKGVYRIREDRTKTTYVGPNGQVLTGSKAVPALVTLPLVNNNGTVIDAHVFPKNSYNKPVVDKRIADTLNYNDQNGLSIGTKIPYVVNTTIPSNATFATSFWSDEMTEGLTYNEDVTITLNNVAMDQADYEVTKGNNGFNLKLTEAGLAKINGKDADQKIQITYSATLNSLAVADIPESNDITYHYGNHQDHGNTPKPTKPNNGQITVTKTWDSQPAPEGVKATVQLVNAKTGEKVGAPVELSENNWTYTWSGLDNSIEYKVEEEYNGYSAEYTVESKGKLGVKNWKDNNPAPINPEEPRVKTYGKKFVKVDQKDTRLENAQFVVKKADSNKYIAFKSTAQQAADEKAAATAKQKLDAAVAAYTNAADKQAAQALVDQAQQEYNVAYKEAKFGYVEVAGKDEAMVLTSNTDGQFQISGLAAGTYKLEEIKAPEGFAKIDDVEFVVGAGSWNQGEFNYLKDVQKNDATKVVNKKITIPQTGGIGTIIFAVAGAAIMGIAVYAYVKNNKDEDQLA

SEQ ID NO: 175 - protein, 654 aa, Streptococcus pneumoniae
MKSINKFLTILAALLLTVSSLFSAATVFAAEQKTKTLTVHKLLMTDQELDAWNSDAITTAGYDGSQNFEQFKQLQGVPQGVTEISGVAFELQSYTGPQGKEQENLTNDAVWTAVNKGVTTETGVKFDTEVLQGTYRLVEVRKESTYVGPNGKVLTGMKAVPALITLPLVNQNGVVENAHVYPKNSEDKPTATKTFDTAAGFVDPGEKGLAIGTKVPYIVTTTIPKNSTLATAFWSDEMTEGLDYNGDVVVNYNGQPLDNSHYTLEAGHNGFILKLNEKGLEAINGKDAEATITLKYTATLNALAVADVPEANDVTFHYGNNPGHGNTPKPNKPKNGELTITKTWADAKDAPIAGVEVTFDLVNAQTGEVVKVPGHETGIVLNQTNNWTFTATGLDNNTEYKFVERTIKGYSADYQTITETGKIAVKNWKDENPEPINPEEPRVKTYGKKFVKVDQKDERLKEAQFVVKNEQGKYLALKSAAQQAVNEKAAAEAKQALDAAIAAYTNAADKNAAQAVVDAAQKTYNDNYRAARFGYVEVERKEDALVLTSNTDGQFQISGLAAGSYTLEETKAPEGFAKLGDVKFEVGAGSWNQGDFNYLKDVQKNDATKVVNKKITIPQTGGIGTIIFAVAGAVIMGIAVYAYVKNNKDEDQLA

SEQ ID NO: 176 - protein, 401 aa, Streptococcus pneumoniae
MTMQKMQKMISRIFFVMALCFSLVWGAHAVQAQEDHTLVLQLENYQEVVSQLPSRDGHRLQVWKLDDSYSYDDRVQIVRDLHSWDENKLSSFKKTSFEMTFLENQIEVSHIPNGLYYVRSIIQTDAVSYPAEFLFEMTDQTVEPLVIVAKKTDTMTTKVKLIKVDQDHNRLEGVGFKLVSVARDVSEKEVPLIGEYRYSSSGQVGRTLYTDKNGEIFVTNLPLGNYRFKEVEPLAGYAVTTLDTDVQLVDHQLVTITVVNQKLPRGNVDFMKVDGRTNTSLQGAMFKVMKEESGHYTPVLQNGKEVVVTSGKDGRFRVEGLEYGTYYLWELQAPTGYVQLTSPVSFTIGKDTRKELVTVVKNNKRPRIDVPDTGEETLYILMLVAILLFGSGYYLTKKPNN

SEQ ID NO: 177 - protein, 1063 aa, Streptococcus pneumoniae
DETLITHTAEKPKEEKMIVEEKADKALETKNVVERTEQSEPSSTEAIASEKKEDEAVTPKEEKVSAKPEEKAPRIESQASSQEKPLKEDAKAVTNEEVNQMIENRKVDFNQNWYFKLNANSKEAIKPDADVSTWKKLDLPYDWSIFNDFDHESPAQNEGGQLNGGEAWYRKTFKLDEKDLKKNVRLTFDGVYMDSQVYVNGQLVGHYPNGYNQFSYDITKYLYKDGRENVIAVHAVNKQPSSRWYSGSGIYRDVTLQVTDKVHVEKNGTTILTPKLEEQQHGKVETHVTSKIVNTDDKDHELVAEYQIVERGGHAVTGLVRTASRTLKAHESTSLDAILEVERPKLWTVLNDKPALYELITRVYRDGQLVDAKKDLFGYRYYHWTPNEGFSLNGERIKFHGVSLHHDHGALGAEENYKAEYRRLKQMKEMGVNSIRTTHNPASEQTLQIAAELGLLVQEEAFDTWYGGKKPYDYGRFFEKDATHPEARKGEKWSDFDLRTMVERGKNNPAIFMWSIGNEIGEANGDAHSLATVKRLVKVIKDVDKTRYVTMGADKFRFGNGSGGHEKIADELDAVGFNYSEDNYKALRAKHPKWLIYGSETSSATRTRGSYYRPERELKHSNGPERNYEQSDYGNDRVGWGKTATASWTFDRDNAGYAGQFIWTGTDYIGEPTPWHNQNQTPVKSSYFGIVDTAGIPKHDFYLYQSQWVSVKKKPMVHLLPHWNWENKELASKVADSEGKIPVRAYSNASSVELFLNGKSLGLKTFNKKQTSDGRTYQEGANANELYLEWKVAYQPGTLEAIARDESGKEIARDKITTAGKPAAVRLIKEDHAIAADGKDLTYIYYEIVDSQGNVVPTANNLVRFQLHGQGQLVGVDNGEQASRERYKAQADGSWIRKAFNGKGVAIVKSTEQAGKFTLTAHSDLLKSNQVTVFTGKKEGQEKTVLGTEVPKVQTIIGEAPEMPTTVPFVYSDGSRAERPVTWSLVDVSKPGIVTVKGMADGREVEARVEVIALKSELPVVKRIAPNTNLNSVDKSVSYVLTDGSVQEYEVDKWEIAEEDKAK

SEQ ID NO: 178 - protein, 1093 aa, Streptococcus pneumoniae
IAEEDKAKLAIPGSRIQATGYLEGQPIHATLVVEEGNPAAPVVPTVTVGGEAVTGLTSRQPMQYRTLSYGAQLPEVTASAENADVTVLQASAANGMRASIFIQPKDGGPLQTYAIQFLEEAPKIAHLSLQVEKADSLKEDQTVKLSVRAHYQDGTQAVLPADKVTFSTSGEGEVAIRKGMLELHKPGAVTLNAEYEGAKGQVELTIQANTEKKIAQSIRPVNVVTDLHQEPSLPATVTVEYDKGFPKTHKVTWQAIPKEKLDSYQIFEVLGKVEGIDLEARAKVSVEGIVSVEEVSVTTPIAEAPQLPESVRTYDSNGHVSSAKVAWDAIRPEQYAKEGVFTVNGRLEGTQLTTKLHVRVSAQTEQGANISDQWTGSELPLAFASDSNPSDPVSNVNDKLISYNNQPANRWTNWNRSNPEASVGVLFGDSGILSKRSVDNLSVGFHEDHGVGAPKSYVIEYYVGKTVPTAPKNPSFVGNEDHVFNDSANWKPVTNLKAPAQLKAGEMNHFSFDKVETYAIRIRMVKADNKRGTSITEVQIFAKQVAAAKQGQTRIQVDGKDLANFNPDLTDYYLESVDGKVPAVTANVSNNGLATVVPSVREGEPVRVIAKAENGDILGEYRLHFTKDKNLLSHKPVAAVKQARLLQVGQALELPTKVPVYFTGKDGYETKDLTVEWEEVPAENLTKAGQFTVRGRVLGSNLVAEVTVRVTDKLGETLSDNPNYDENSNQAFASATNDIDKNSHDRVDYLNDGDHSENRRWTNWSPTPSSNPEVSAGVIFRENGKIVERTVAQAKLHFFADSGTDAPSKLVLERYVGPGFEVPTYYSNYQAYESGHPFNNPENWEAVPYRADKDIAAGDEINVTFKAVKAKVMRWRMERKADKSGVAMIEMTFLAPSELPQESTQSKILVDGKELADFAENRQDYQITYKGQRPKVSVEENNQVASTVVDSGEDSLPVLVRLVSESGKQVKEYRIQLTKEKPVSAVQEDLPKLEFVEKDLAYKTVEKKDSTLYLGETRVEQEGKVGKERIFTVINPDGSKEEKLREVVEVPTDRIVLVGTKPVAQEAKKPQVSEKADTKPIDSSEADQTNKAQ

SEQ ID NO: 179 - protein, 883 aa, Streptococcus pneumoniae
MKKVRKIFQKAVAGLCCISQLTAFSSIVALAETPETSPAIGKVVIKETGEGGALLGDAVFELKNNTDGTTVSQRTEAQTGEAIFSNIKPGTYTLTEAQPPVGYKPSTKQWTVEVEKNGRTTVQGEQVENREEALSDQYPQTGTYPDVQTPYQIIKVDGSEKNGQHKALNPNPYERVIPEGTLSKRIYQVNNLDDNQYGIELTVSGKTTVETKEASTPLDVVILLDNSNSMSNIRHNHAHRAEKAGEATRALVDKITSNPDNRVALVTYGSTIFDGSEATVEKGVADANGKILNDSALWTFDRTTFTAKTYNYSFLNLTSDPTDIQTIKDRIPSDAEELNKDKLMYQFGATFTQKALMTADDILTKQARPNSKKVIFHITDGVPTMSYPINFKYTGTTQSYRTQLNNFKAKTPNSSGILLEDFVTWSADGEHKIVRGDGESYQMFTKKPVTDQYGVHQILSITSMEQRAKLVSAGYRFYGTDLYLYWRDSILAYPFNSSTDWITNHGDPTTWYYNGNMAQDGYDVFTVGVGVNGDPGTDEATATRFMQSISSSPDNYTNVADPSQILQELNRYFYTIVNEKKSIENGTITDPMGELIDFQLGADGRFDPADYTLTANDGSSLVNNVPTGGPQNDGGLLKNAKVFYDTTEKRIRVTGLYLGTGEKVTLTYNVRLNDQFVSNKFYDTNGRTTLHPKEVEKNTVRDFPIPKIRDVRKYPEITIPKEKKLGEIEFIKINKNDKKPLRDAVFSLQKQHPDYPDIYGAIDQNGTYQNVRTGEDGKLTFKNLSDGKYRLFENSEPAGYKPVQNKPIVAFQIVNGEVRDVTSIVPQDIPAGYEFTNDKHYITNEPIPPKREYPRTGGIGMLPFYLIGCMMMGGVLLYTRKHP

SEQ ID NO: 180 - protein, 1247 aa, Streptococcus pneumoniae
ADGVTPTTTENQPTIHTVSDSPQSSENRTEETPKAELQPEAPKTVETETPATDKVASLPKTEEKPQEEVSSTPSDKAEVVTPTSAEKETANKKEEEASPKKEEAKEVDSKESNTDKTDKDKPAKKDEAKAEADKPETETGKERAATVNEKLAKKKIVSIDAGRKYFSPEQLKEIIDKAKHYGYTDLHLLVGNDGLRFMLDDMSITANGKTYASDDVKRAIEKGTNDYYNDPNGNHLTESQMTDLINYAKDKGIGLIPTVNSPGHMDAILNAMKELGIQNPNFSYFGKKSARTVDLDNEQAVAFTKALIDKYAAYFAKKTEIFNIGLDEYANDATDAKGWSVLQADKYYPNEGYPVKGYEKFIAYANDLARIVKSHGLKPMAFNDGIYYNSDTSFGSFDKDIIVSMWTGGWGGYDVASSKLLAEKGHQILNTNDAWCYVLGRNADGQGWYNLDQGLNGIKNTPITSVPKTEGADIPIIGGMVAAWADTPSARYSPSHLFKLMRHFANANAEYFAADYESAEQALNEVPKDLNRYTAESVAAVKEAEKAIRSLDSNLSRAQQDTIDQAIAKLQETVNNLTLTPEAQKEEEAKREVEKLAKNKVISIDAGRKYFTLDQLKRIVDKASELGYSDVHLLLGNDGLRFLLNDMTITANGKTYASDDVKKAIIEGTKAYYDDPNGTALTQAEVTELIEYAKSKDIGLIPAINSPGHMDAMLVAMEKLGIKNPQAHFDKVSKTTMDLKNEEAMNFVKALIGKYMDFFAGKTKIFNFGTDEYANDATSAQGWYYLKWYQLYGKFAEYANTLAAMAKERGLQPMAFNDGFYYEDKDDVQFDKDVLISYWSKGWWGYNLASPQYLASKGYKFLNTNGDWYYVIGNHKQDEAYPLSKAVENSGKVPFNQLASTKYPEVDLPTVGSMLSIWADRPSAEYKEEEIFELMTAFADHNKDYFRANYNALREELAKIPTNLEGYSKESLEALDAAKTALNYNLNRNKQAELDTLVANLKAALQGLKPAATHSGSLDENEVAANVETRPELITRTEEIPFEVIKKENPNLPAGQENIITAGVKGERTHYISVLTENGKTTETVLDSQVTKEVINQVVEVGSPVTHKGDESGLAPTTEVKPRLDIQEEEIPFTTVTRENPLLLKGKTQVITKGVNGHRSNFYSVSTSADGKEVKTLVNSVVAQEAVTQIVEVGTMVTHVGDENGQAAIAEEKPKLEIPSQPAPSTAPAEESKALPQDPAPVVTEKK

SEQ ID NO: 181 - protein, 1008 aa, Streptococcus pneumoniae
GAEETTTNTIQQSQKEVQYQQRDTKNLVENGDFGQTEDGSSPWTGSKAQGWSAWVDQKNSSADASTRVIEAKDGAITISSPEKLRAAVHRMVPIEAKKKYKLRFKIKTDNKVGIAKVRIIEESGKDKRLWNSATTSGTKDWQTIEADYSPTLDVDKIKLELFYETGTGTVSFKDIELVEVADQPSEDSQTDKQLEEKIDLPIGKKHVFSLADYTYKVENPDVASVKNGILEPLKEGTTNVIVSKDGKEVKKIPLKILASVKDTYTDRLDDWNGIIAGNQYYDSKNEQMAKLNQELEGKVADSLSSISSQADRIYLWEKFSNYKTSANLTATYRKLEEMAKQVTNPSSRYYQDETVVRTVRDSMEWMHKHVYNSEKSIVGNWWDYEIGTPRAINNTLSLMKEYFSDEEIKKYTDVIEKFVPDPEHFRKTTDNPFKALGGNLVDMGRVKVIAGLLRKDDQEISSTIRSIEQVFKLVDQGEGFYQDGSYIDHTNVAYTGAYGNVLIDGLSQLLPVIQKTKNPIDKDKMQTMYHWIDKSFAPLLVNGELMDMSRGRSISRANSEGHVAAVEVLRGIHRIADMSEGETKQRLQSLVKTIVQSDSYYDVFKNLKTYKDISLMQSLLSDAGVASVPRTSYLSAFNKMDKTAMYNAEKGFGFGLSLFSSRTLNYEHMNKENKRGWYTSDGMFYLYNGDLSHYSDGYWPTVNPYKMPGTTETDAKRADSDTGKVLPSAFVGTSKLDDANATATMDFTNWNQTLTAHKSWFMLKDKIAFLGSNIQNTSTDTAATTIDQRKLESSNPYKVYVNDKEASLTEQEKDYPETQSVFLESSDSKKNIGYFFFKKSSISMSKALQKGAWKDINEGQSDKEVENEFLTISQAHKQNGDSYGYMLIPNVDRATFNQMIKELESSLIENNETLQSVYDAKQGVWGIVKYDDSVSTISNQFQVLKRGVYTIRKEGDEYKIAYYNPETQESAPDQEVFKKLEQAAQPQVQNSKEKEKSEEEKNHSDQKN

SEQ ID NO: 182 - protein, 628 aa, Streptococcus pneumoniae
GAEETTTNTIQQSQKEVQYQQRDTKNLVENGDFGQTEDGSSPWTGSKAQGWSAWVDQKNSSADASTRVIEAKDGAITISSPEKLRAAVHRMVPIEAKKKYKLRFKIKTDNKVGIAKVRIIEESGKDKRLWNSATTSGTKDWQTIEADYSPTLDVDKIKLELFYETGTGTVSFKDIELVEVADQPSEDSQTDKQLEEKIDLPIGKKHVFSLADYTYKVENPDVASVKNGILEPLKEGTTNVIVSKDGKEVKKIPLKILASVKDTYTDRLDDWNGIIAGNQYYDSKNEQMAKLNQELEGKVADSLSSISSQADRIYLWEKFSNYKTSANLTATYRKLEEMAKQVTNPSSRYYQDETVVRTVRDSMEWMHKHVYNSEKSIVGNWWDYEIGTPRAINNTLSLMKEYFSDEEIKKYTDVIEKFVPDPEHFRKTTDNPFKALGGNLVDMGRVKVIAGLLRKDDQEISSTIRSIEQVFKLVDQGEGFYQDGSYIDHTNVAYTGAYGNVLIDGLSQLLPVIQKTKNPIDKDKMQTMYHWIDKSFAPLLVNGELMDMSRGRSISRANSEGHVAAVEVLRGIHRIADMSEGETKQRLQSLVKTIVQSDSYYDVFKNLKTYKDISLMQSLLSDAGVASV

SEQ ID NO: 183 - protein, 452 aa, Streptococcus pneumoniae
ANSEGHVAAVEVLRGIHRIADMSEGETKQRLQSLVKTIVQSDSYYDVFKNLKTYKDISLMQSLLSDAGVASVPRTSYLSAFNKMDKTAMYNAEKGFGFGLSLFSSRTLNYEHMNKENKRGWYTSDGMFYLYNGDLSHYSDGYWPTVNPYKMPGTTETDAKRADSDTGKVLPSAFVGTSKLDDANATATMDFTNWNQTLTAHKSWFMLKDKIAFLGSNIQNTSTDTAATTIDQRKLESSNPYKVYVNDKEASLTEQEKDYPETQSVFLESSDSKKNIGYFFFKKSSISMSKALQKGAWKDINEGQSDKEVENEFLTISQAHKQNGDSYGYMLIPNVDRATFNQMIKELESSLIENNETLQSVYDAKQGVWGIVKYDDSVSTISNQFQVLKRGVYTIRKEGDEYKIAYYNPETQESAPDQEVFKKLEQAAQPQVQNSKEKEKSEEEKNHSDQKN

SEQ ID NO: 184 - protein, 2148 aa, Streptococcus pneumoniae
DETLITHTAEKPKEEKMIVEEKADKALETKNVVERTEQSEPSSTEAIASEKKEDEAVTPKEEKVSAKPEEKAPRIESQASSQEKPLKEDAKAVTNEEVNQMIENRKVDFNQNWYFKLNANSKEAIKPDADVSTWKKLDLPYDWSIFNDFDHESPAQNEGGQLNGGEAWYRKTFKLDEKDLKKNVRLTFDGVYMDSQVYVNGQLVGHYPNGYNQFSYDITKYLYKDGRENVIAVHAVNKQPSSRWYSGSGIYRDVTLQVTDKVHVEKNGTTILTPKLEEQQHGKVETHVTSKIVNTDDKDHELVAEYQIVERGGHAVTGLVRTASRTLKAHESTSLDAILEVERPKLWTVLNDKPALYELITRVYRDGQLVDAKKDLFGYRYYHWTPNEGFSLNGERIKFHGVSLHHDHGALGAEENYKAEYRRLKQMKEMGVNSIRTTHNPASEQTLQIAAELGLLVQEEAFDTWYGGKKPYDYGRFFEKDATHPEARKGEKWSDFDLRTMVERGKNNPAIFMWSIGNEIGEANGDAHSLATVKRLVKVIKDVDKTRYVTMGADKFRFGNGSGGHEKIADELDAVGFNYSEDNYKALRAKHPKWLIYGSETSSATRTRGSYYRPERELKHSNGPERNYEQSDYGNDRVGWGKTATASWTFDRDNAGYAGQFIWTGTDYIGEPTPWHNQNQTPVKSSYFGIVDTAGIPKHDFYLYQSQWVSVKKKPMVHLLPHWNWENKELASKVADSEGKIPVRAYSNASSVELFLNGKSLGLKTFNKKQTSDGRTYQEGANANELYLEWKVAYQPGTLEAIARDESGKEIARDKITTAGKPAAVRLIKEDHAIAADGKDLTYIYYEIVDSQGNVVPTANNLVRFQLHGQGQLVGVDNGEQASRERYKAQADGSWIRKAFNGKGVAIVKSTEQAGKFTLTAHSDLLKSNQVTVFTGKKEGQEKTVLGTEVPKVQTIIGEAPEMPTTVPFVYSDGSRAERPVTWSLVDVSKPGIVTVKGMADGREVEARVEVIALKSELPVVKRIAPNTNLNSVDKSVSYVLTDGSVQEYEVDKWEIAEEDKAKLAIPGSRIQATGYLEGQPIHATLVVEEGNPAAPVVPTVTVGGEAVTGLTSRQPMQYRTLSYGAQLPEVTASAENADVTVLQASAANGMRASIFIQPKDGGPLQTYAIQFLEEAPKIAHLSLQVEKADSLKEDQTVKLSVRAHYQDGTQAVLPADKVTFSTSGEGEVAIRKGMLELHKPGAVTLNAEYEGAKGQVELTIQANTEKKIAQSIRPVNVVTDLHQEPSLPATVTVEYDKGFPKTHKVTWQAIPKEKLDSYQIFEVLGKVEGIDLEARAKVSVEGIVSVEEVSVTTPIAEAPQLPESVRTYDSNGHVSSAKVAWDAIRPEQYAKEGVFTVNGRLEGTQLTTKLHVRVSAQTEQGANISDQWTGSELPLAFASDSNPSDPVSNVNDKLISYNNQPANRWTNWNRSNPEASVGVLFGDSGILSKRSVDNLSVGFHEDHGVGAPKSYVIEYYVGKTVPTAPKNPSFVGNEDHVFNDSANWKPVTNLKAPAQLKAGEMNHFSFDKVETYAIRIRMVKADNKRGTSITEVQIFAKQVAAAKQGQTRIQVDGKDLANFNPDLTDYYLESVDGKVPAVTANVSNNGLATVVPSVREGEPVRVIAKAENGDILGEYRLHFTKDKNLLSHKPVAAVKQARLLQVGQALELPTKVPVYFTGKDGYETKDLTVEWEEVPAENLTKAGQFTVRGRVLGSNLVAEVTVRVTDKLGETLSDNPNYDENSNQAFASATNDIDKNSHDRVDYLNDGDHSENRRWTNWSPTPSSNPEVSAGVIFRENGKIVERTVAQAKLHFFADSGTDAPSKLVLERYVGPGFEVPTYYSNYQAYESGHPFNNPENWEAVPYRADKDIAAGDEINVTFKAVKAKVMRWRMERKADKSGVAMIEMTFLAPSELPQESTQSKILVDGKELADFAENRQDYQITYKGQRPKVSVEENNQVASTVVDSGEDSLPVLVRLVSESGKQVKEYRIQLTKEKPVSAVQEDLPKLEFVEKDLAYKTVEKKDSTLYLGETRVEQEGKVGKERIFTVINPDGSKEEKLREVVEVPTDRIVLVGTKPVAQEAKKPQVSEKADTKPIDSSEADQTNKAQ

SEQ ID NO: 185 - protein, 680 aa, Streptococcus pneumoniae
ASDGTWQGKQYLKEDGSQAANEWVFDTHYQSWFYIKADANYAENEWLKQGDDYFYLKSGGYMAKSEWVEDKGAFYYLDQDGKMKRNAWVGTSYVGATGAKVIEDWVYDSQYDAWFYIKADGQHAEKEWLQIKGKDYYFKSGGYLLTSQWINQAYVNASGAKVQQGWLFDKQYQSWFYIKENGNYADKEWIFENGHYYYLKSGGYMAANEWIWDKESWFYLKFDGKIAEKEWVYDSHSQAWYYFKSGGYMAANEWIWDKESWFYLKFDGKMAEKEWVYDSHSQAWYYFKSGGYMTANEWIWDKESWFYLKSDGKIAEKEWVYDSHSQAWYYFKSGGYMTANEWIWDKESWFYLKSDGKMAEKEWVYDSHSQAWYYFKSGGYMAKNETVDGYQLGSDGKWLGGKATNKNAAYYQVVPVTANVYDSDGEKLSYISQGSVVWLDKDRKSDDKRLAITISGLSGYMKTEDLQALDASKDFIPYYESDGHRFYHYVAQNASIPVASHLSDMEVGKKYYSADGLHFDGFKLENPFLFKDLTEATNYSAEELDKVFSLLNINNSLLENKGATFKEAEEHYHINALYLLAHSALESNWGRSKIAKDKNNFFGITAYDTTPYLSAKTFDDVDKGILGATKWIKENYIDRGRTFLGNKASGMNVEYASDPYWGEKIASVMMKINEKLGGKD

SEQ ID NO: 186 - protein, 294 aa, Streptococcus pneumoniae
ACSKGSEGADLISMKGDVITEHQFYEQVKNNPSAQQVLLNMTIQKVFEKQYGSELDDKEVDDTIAEEKKQYGENYQRVLSQAGMTLETRKAQIRTSKLVELAVKKVAEAELTDEAYKKAFDEYTPDVTAQIIRLNNEDKAKEVLEKAKAEGADFAQLAKDNSTDEKTKENGGEITFDSASTEVPEQVKKAAFALDVDGVSDVITATGTQAYSSQYYIVKLTKKTEKSSNIDDYKEKLKTVILTQKQNDSTFVQSIIGKELQAANIKVKDQAFQNIFTQYIGGGDSSSSSSTSNE

SEQ ID NO: 187 - protein, 218 aa, Streptococcus pneumoniae
ALIFNTQIRNIFIVWNTNKYQVSQVSKEKLEENQDTEGNFDFDSVKAISSEAVLTSQWDAQKLPVIGGIAIPELEMNLPIFKGLDNVNLFYGAGTMKREQVMGEGNYSLASHHIFGVDNANKMLFSPLDNAKNGMKIYLTDKNKVYTYEIREVKRVTPDRVDEVDDRDGVNEITLVTCEDLAATERIIVKGDLKETKDYSQTSDEILTAFNQPYKQFY

SEQ ID NO: 188 - protein, 165 aa, Streptococcus pneumoniae
VPKTATSTETKTITRIIHYVDKVTNQNVKEDVVQPVTLSRTKTENKVTGVVTYGEWTTGNWDEVISGKIDKYKDPDIPTVESQEVTSDSSDKEITVRYDRLSTPEKPIPQPNPEHPSVPTPNPELPNQETPTPDKPTPEPGTPKTETPVNPDPEVPTYETGKREE

SEQ ID NO: 189 - protein, 469 aa, Streptococcus pneumoniae
ANETEVAKTSQDTTTASSSSEQNQSSNKTQTSAEVQTNAAAYWDGDYYVKDDGSKAQSEWIFDNYYKAWFYINSDGRYSQNEWHGNYYLKSGGYMAQNEWIYDSNYKSWFYLKSDGAYAHQEWQLIGNKWYYFKKWGYMAKSQWQGSYFLNGQGAMIQNEWLYDPAYSAYFYLKSDGTYANQEWQKVGGKWYYFKKWGYMARNEWQGNYYLTGSGAMATDEVIMDGARYIFAASGELKEKKDLNVGWVHRDGKRYFFNNREEQVGTEHAKKIIDISEHNGRINDWKKVIDENKVDGVIVRLGYSGKEDKELAHNIKELNRLGIPYGVYLYTYAENETDAENDAKQTIELIKKYNMNLSYPIYYDVENWEYVNKSKRAPSDTDTWVKIINKYMDTMKQAGYQNVYVYSYRSLLQTRLKHPDILKHVNWVAAYTNALEWENPYYSGEKGWQYTSSEYMKGIQGRVDVSVWY

SEQ ID NO: 190 - protein, 366 aa, Streptococcus pneumoniae
AETTDDKIAAQDNKISNLTAQQQEAQKQVDQIQEQVSAIQAEQSNLQAENDRLQAESKKLEGEITELSKNIVSRNQSLEKQARSAQTNGAVTSYINTIVNSKSITEAISRVAAMSEIVSANNKMLEQQKADKKAISEKQVANNDAINTVIANQQKLADDAQALTTKQAELKAAELSLAAEKATAEGEKASLLEQKAAAEAEARAAAVAEAAYKEKRASQQQSVLASANTNLTAQVQAVSESAAAPVRAKVRPTYSTNASSYPIGECTWGVKTLAPWAGDYWGNGAQWATSAAAAGFRTGSTPQVGAIACWNDGGYGHVAVVTAVESTTRIQVSESNYAGNRTIGNHRGWFNPTTTSEGFVTYIYAD

SEQ ID NO: 191 - protein, 821 aa, Streptococcus pneumoniae
ETPETSPAIGKVVIKETGEGGALLGDAVFELKNNTDGTTVSQRTEAQTGEAIFSNIKPGTYTLTEAQPPVGYKPSTKQWTVEVEKNGRTTVQGEQVENREEALSDQYPQTGTYPDVQTPYQIIKVDGSEKNGQHKALNPNPYERVIPEGTLSKRIYQVNNLDDNQYGIELTVSGKTTVETKEASTPLDVVILLDNSNSMSNIRHNHAHRAEKAGEATRALVDKITSNPDNRVALVTYGSTIFDGSEATVEKGVADANGKILNDSALWTFDRTTFTAKTYNYSFLNLTSDPTDIQTIKDRIPSDAEELNKDKLMYQFGATFTQKALMTADDILTKQARPNSKKVIFHITDGVPTMSYPINFKYTGTTQSYRTQLNNFKAKTPNSSGILLEDFVTWSADGEHKIVRGDGESYQMFTKKPVTDQYGVHQILSITSMEQRAKLVSAGYRFYGTDLYLYWRDSILAYPFNSSTDWITNHGDPTTWYYNGNMAQDGYDVFTVGVGVNGDPGTDEATATRFMQSISSSPDNYTNVADPSQILQELNRYFYTIVNEKKSIENGTITDPMGELIDFQLGADGRFDPADYTLTANDGSSLVNNVPTGGPQNDGGLLKNAKVFYDTTEKRIRVTGLYLGTGEKVTLTYNVRLNDQFVSNKFYDTNGRTTLHPKEVEKNTVRDFPIPKIRDVRKYPEITIPKEKKLGEIEFIKINKNDKKPLRDAVFSLQKQHPDYPDIYGAIDQNGTYQNVRTGEDGKLTFKNLSDGKYRLFENSEPAGYKPVQNKPIVAFQIVNGEVRDVTSIVPQDIPAGYEFTNDKHYITNEPIPPKRE

SEQ ID NO: 192 - protein, 824 aa, Streptococcus pneumoniae
ETPETSPAIGKVVIKETGEGGALLGDAVFELKNNTDGTTVSQRTEAQTGEAIFSNIKPGTYTLTEAQPPVGYKPSTKQWTVEVEKNGRTTVQGEQVENREEALSDQYPQTGTYPDVQTPYQIIKVDGSEKNGQHKALNPNPYERVIPEGTLSKRIYQVNNLDDNQYGIELTVSGKTVYEQKDKSVPLDVVILLDNSNSMSNIRNKNARRAERAGEATRSLIDKITSDSENRVALVTYASTIFDGTEFTVEKGVADKNGKRLNDSLFWNYDQTSFTTNTKDYSYLKLTNDKNDIVELKNKVPTEAEDHDGNRLMYQFGATFTQKALMKADEILTQQARQNSQKVIFHITDGVPTMSYPINFNHATFAPSYQNQLNAFFSKSPNKDGILLSDFITQATSGEHTIVRGDGQSYQMFTDKTVYEKGAPAAFPVKPEKYSEMKAAGYAVIGDPINGGYIWLNWRESILAYPFNSNTAKITNHGDPTRWYYNGNIAPDGYDVFTVGIGINGDPGTDEATATSFMQSISSKPENYTNVTDTTKILEQLNRYFHTIVTEKKSIENGTITDPMGELIDLQLGTDGRFDPADYTLTANDGSRLENGQAVGGPQNDGGLLKNAKVLYDTTEKRIRVTGLYLGTDEKVTLTYNVRLNDEFVSNKFYDTNGRTTLHPKEVEQNTVRDFPIPKIRDVRKYPEITISKEKKLGDIEFIKVNKNDKKPLRGAVFSLQKQHPDYPDIYGAIDQNGTYQNVRTGEDGKLTFKNLSDGKYRLFENSEPAGYKPVQNKPIVAFQIVNGEVRDVTSIVPQDIPAGYEFTNDKHYITNEPIPPKRE

SEQ ID NO: 193 - protein, 1630 aa, Artificial Sequence
  Description of Artificial Sequence: Synthetic hybrid polypeptide
MAETTDDKIAAQDNKISNLTAQQQEAQKQVDQIQEQVSAIQAEQSNLQAENDRLQAESKKLEGEITELSKNIVSRNQSLEKQARSAQTNGAVTSYINTIVNSKSITEAISRVAAMSEIVSANNKMLEQQKADKKAISEKQVANNDAINTVIANQQKLADDAQALTTKQAELKAAELSLAAEKATAEGEKASLLEQKAAAEAEARAAAVAEAAYKEKRASQQQSVLASANTNLTAQVQAVSESAAAPVRAKVRPTYSTNASSYPIGECTWGVKTLAPWAGDYWGNGAQWATSAAAAGFRTGSTPQVGAIACWNDGGYGHVAVVTAVESTTRIQVSESNYAGNRTIGNHRGWFNPTTTSEGFVTYIYADGSGSGGGGADGVTPTTTENQPTIHTVSDSPQSSENRTEETPKAVLQPEAPKTVETETPATDKVASLPKTEEKPQEEVSSTPSDKAEVVTPTSAEKETANKKAEEASPKKEEAKEVDSKESNTDKTDKDKPAKKDEAKAEADKPATEAGKERAATVNEKLAKKKIVSIDAGRKYFSPEQLKEIIDKAKHYGYTDLHLLVGNDGLRFMLDDMSITANGKTYASDDVKRAIEKGTNDYYNDPNGNHLTESQMTDLINYAKDKGIGLIPTVNSPGHMDAILNAMKELGIQNPNFSYFGKKSARTVDLDNEQAVAFTKALIDKYAAYFAKKTEIFNIGLDEYANDATDAKGWSVLQADKYYPNEGYPVKGYEKFIAYANDLARIVKSHGLKPMAFNDGIYYNSDTSFGSFDKDIIVSMWTGGWGGYDVASSKLLAEKGHQILNTNDAWYYVLGRNADGQGWYNLDQGLNGIKNTPITSVPKTEGADIPIIGGMVAAWADTPSARYSPSRLFKLMRHFANANAEYFAADYESAEQALNEVPKDLNRYTAESVTAVKEAEKAIRSLDSNLSRAQQDTIDQAIAKLQETVNNLTLTPEAQKEEEAKREVEKLAKNKVISIDAGRKYFTLNQLKRIVDKASELGYSDVHLLLGNDGLRFLLDDMTITANGKTYASDDVKKAIIEGTKAYYDDPNGTALTQAEVTELIEYAKSKDIGLIPAINSPGHMDAMLVAMEKLGIKNPQAHFDKVSKTTMDLKNEEAMNFVKALIGKYMDFFAGKTKIFNFGTDEYANDATSAQGWYYLKWYQLYGKFAEYANTLAAMAKERGLQPMAFNDGFYYEDKDDVQFDKDVLISYWSKGWWGYNLASPQYLASKGYKFLNTNGDWYYILGQKPEDGGGFLKKAIENTGKTPFNQLASTKYPEVDLPTVGSMLSIWADRPSAEYKEEEIFELMTAFADHNKDYFRANYNALREELAKIPTNLEGYSKESLEALDAAKTALNYNLNRNKQAELDTLVANLKAALQGLKPAVTHSGSLDENEVAANVETRPELITRTEEIPFEVIKKENPNLPAGQENIITAGVKGERTHYISVLTENGKTTETVLDSQVTKEVINQVVEVGAPVTHKGDESGLAPTTEVKPRLDIQEEEIPFTTVTCENPLLLKGKTQVITKGVNGHRSNFYSVSTSADGKEVKTLVNSVVAQEAVTQIVEVGTMVTHVGDENGQAAIAEEKPKLEIPSQPAPSTAPAEESKVLPQDPAPVVTEKKLEHHHHHH

SEQ ID NO: 194 - protein, 552 aa, Artificial Sequence
  Description of Artificial Sequence: Synthetic hybrid polypeptide
MAETTDDKIAAQDNKISNLTAQQQEAQKQVDQIQEQVSAIQAEQSNLQAENDRLQAESKKLEGEITELSKNIVSRNQSLEKQARSAQTNGAVTSYINTIVNSKSITEAISRVAAMSEIVSANNKMLEQQKADKKAISEKQVANNDAINTVIANQQKLADDAQALTTKQAELKAAELSLAAEKATAEGEKASLLEQKAAAEAEARAAAVAEAAYKEKRASQQQSVLASANTNLTAQVQAVSESAAAPVRAKVRPTYSTNASSYPIGECTWGVKTLAPWAGDYWGNGAQWATSAAAAGFRTGSTPQVGAIACWNDGGYGHVAVVTAVESTTRIQVSESNYAGNRTIGNHRGWFNPTTTSEGFVTYIYADGSGSGGGGVSAQESSTYTVKEGDTLSEIAETHNTTVEKLAENNHIDNIHLIYVDQELVIDGPVAPVATPAPATYAAPAAQDETVSAPVAETPVVSETVVSTVSGSEAEAKEWIAQKESGGSYTATNGRYIGRYQLTDSYLNGDYSAENQERVADAYVAGRYGSWTAAKNFWLNNGWYLEHHHHHH

SEQ ID NO: 195 - protein, 2539 aa, Artificial Sequence
  Description of Artificial Sequence: Synthetic hybrid polypeptide
MAETTDDKIAAQDNKISNLTAQQQEAQKQVDQIQEQVSAIQAEQSNLQAENDRLQAESKKLEGEITELSKNIVSRNQSLEKQARSAQTNGAVTSYINTIVNSKSITEAISRVAAMSEIVSANNKMLEQQKADKKAISEKQVANNDAINTVIANQQKLADDAQALTTKQAELKAAELSLAAEKATAEGEKASLLEQKAAAEAEARAAAVAEAAYKEKRASQQQSVLASANTNLTAQVQAVSESAAAPVRAKVRPTYSTNASSYPIGECTWGVKTLAPWAGDYWGNGAQWATSAAAAGFRTGSTPQVGAIACWNDGGYGHVAVVTAVESTTRIQVSESNYAGNRTIGNHRGWFNPTTTSEGFVTYIYADGSGSGGGGDETLITHTAEKPKEEKMIVEEKADKALETKNIVERTEQSEPSSTEAIASEKKEDEAVTPKEEKVSAKPEEKAPRIESQASNQEKPLKEDAKAVTNEEVNQMIEDRKVDFNQNWYFKLNANSKEAIKPDADVSTWKKLDLPYDWSIFNDFDHESPAQNEGGQLNGGEAWYRKTFKLDEKDLKKNVRLTFDGVYMDSQVYVNGQLVGHYPNGYNQFSYDITKYLQKDGRENVIAVHAVNKQPSSRWYSGSGIYRDVTLQVTDKVHVEKNGTTILTPKLEEQQHGKVETHVTSKIVNTDDKDHELVAEYQIVERGGHAVTGLVRTASRTLKAHESTSLDAILEVERPKLWTVLNDKPALYELITRVYRDGQLVDAKKDLFGYRYYHWTPNEGFSLNGERIKFHGVSLHHDHGALGAEENYKAEYRRLKQMKEMGVNSIRTTHNPASEQTLQIAAELGLLVQEEAFDTWYGGKKPYDYGRFFEKDATHPEARKGEKWSDFDLRTMVERGKNNPAIFMWSIGNEIGEANGDAHSLATVKRLVKVIKDVDKTRYVTMGADKFRFGNGSGGHEKIADELDAVGFNYSEDNYKALRAKHPKWLIYGSETSSATRTRGSYYRPERELKHSNGPERNYEQSDYGNDRVGWGKTATASWTFDRDNAGYAGQFIWTGTDYIGEPTPWHNQNQTPVKSSYFGIVDTAGIPKHDFYLYQSQWVSVKKKPMVHLLPHWNWENKELASKVADSEGKIPVRAYSNASSVELFLNGKSLGLKTFNKKQTSDGRTYQEGANANELYLEWKVAYQPGTLEAIARDESGKEIARDKITTAGKPAAVRLIKEDHAIAADGKDLTYIYYEIVDSQGNVVPTANNLVRFQLHGQGQLVGVDNGEQASRERYKAQADGSWIRKAFNGKGVAIVKSTEQAGKFTLTAHSDLLKSNQVTVFTGKKEGQEKTVLGTEVPKVQTIIGEAPEMPTTVPFVYSDGSRAERPVTWSSVDVSKPGIVTVKGMADGREVEARVEVIALKSELPVVKRIAPNTDLNSVDKSVSYVLIDGSVEEYEVDKWEIAEEDKAKLAIPGSRIQATGYLEGQPIHATLVVEEGNPAAPAVPTVTVGGEAVTGLTSQKPMQYRTLAYGAKLPEVTASAKNAAVTVLQASAANGMRASIFIQPKDGGPLQTYAIQFLEEAPKIAHLSLQVEKADSLKEDQTVKLSVRAHYQDGTQAVLPADKVTFSTSGEGEVAIRKGMLELHKPGAVTLNAEYEGAKDQVELTIQANTEKKIAQSIRPVNVVTDLHQEPSLPATVTVEYDKGFPKTHKVTWQAIPKEKLDSYQTFEVLGKVEGIDLEARAKVSVEGIVSVEEVSVTTPIAEAPQLPESVRTYDSNGHVSSAKVAWDAIRPEQYAKEGVFTVNGRLEGTQLTTKLHVRVSAQTEQGANISDQWTGSELPLAFASDSNPSDPVSNVNDKLISYNNQPANRWTNWNRTNPEASVGVLFGDSGILSKRSVDNLSVGFHEDHGVGVPKSYVIEYYVGKTVPTAPKNPSFVGNEDHVFNDSANWKPVTNLKAPAQLKAGEMNHFSFDKVETYAVRIRMVKADNKRGTSITEVQIFAKQVAAAKQGQTRIQVDGKDLANFNPDLTDYYLESVDGKVPAVTASVSNNGLATVVPSVREGEPVRVIAKAENGDILGEYRLHFTKDKSLLSHKPVAAVKQARLLQVGQALELPTKVPVYFTGKDGYETKDLTVEWEEVPAENLTKAGQFTVRGRVLGSNLVAEITVRVTDKLGETLSDNPNYDENSNQAFASATNDIDKNSHDRVDYLNDGDHSENRRWTNWSPTPSSNPEVSAGVIFRENGKIVERTVTQGKVQFFADSGTDAPSKLVLERYVGPEFEVPTYYSNYQAYDADHPFNNPENWEAVPYRADKDIAAGDEINVTFKAIKAKAMRWRMERKADKSGVAMIEMTFLAPSELPQESTQSKILVDGKELADFAENRQDYQITYKGQRPKVSVEENNQVASTVVDSGEDSFPVLVRLVSESGKQVKEYRIHLTKEKPVSEKTVAAVQEDLPKIEFVEKDLAYKTVEKKDSTLYLGETRVEQEGKVGKERIFTAINPDGSKEEKLREVVEVPTDRIVLVGTKPVAQEAKKPQVSEKADTKPIDSSEASQTNKAQAAALEHHHHHH

SEQ ID NO: 196 - protein, 1449 aa, Artificial Sequence
  Description of Artificial Sequence: Synthetic hybrid polypeptide
MAETTDDKIAAQDNKISNLTAQQQEAQKQVDQIQEQVSAIQAEQSNLQAENDRLQAESKKLEGEITELSKNIVSRNQSLEKQARSAQTNGAVTSYINTIVNSKSITEAISRVAAMSEIVSANNKMLEQQKADKKAISEKQVANNDAINTVIANQQKLADDAQALTTKQAELKAAELSLAAEKATAEGEKASLLEQKAAAEAEARAAAVAEAAYKEKRASQQQSVLASANTNLTAQVQAVSESAAAPVRAKVRPTYSTNASSYPIGECTWGVKTLAPWAGDYWGNGAQWATSAAAAGFRTGSTPQVGAIACWNDGGYGHVAVVTAVESTTRIQVSESNYAGNRTIGNHRGWFNPTTTSEGFVTYIYADGSGSGGGGDETLITHTAEKPKEEKMIVEEKADKALETKNIVERTEQSEPSSTEAIASEKKEDEAVTPKEEKVSAKPEEKAPRIESQASNQEKPLKEDAKAVTNEEVNQMIEDRKVDFNQNWYFKLNANSKEAIKPDADVSTWKKLDLPYDWSIFNDFDHESPAQNEGGQLNGGEAWYRKTFKLDEKDLKKNVRLTFDGVYMDSQVYVNGQLVGHYPNGYNQFSYDITKYLQKDGRENVIAVHAVNKQPSSRWYSGSGIYRDVTLQVTDKVHVEKNGTTILTPKLEEQQHGKVETHVTSKIVNTDDKDHELVAEYQIVERGGHAVTGLVRTASRTLKAHESTSLDAILEVERPKLWTVLNDKPALYELITRVYRDGQLVDAKKDLFGYRYYHWTPNEGFSLNGERIKFHGVSLHHDHGALGAEENYKAEYRRLKQMKEMGVNSIRTTHNPASEQTLQIAAELGLLVQEEAFDTWYGGKKPYDYGRFFEKDATHPEARKGEKWSDFDLRTMVERGKNNPAIFMWSIGNEIGEANGDAHSLATVKRLVKVIKDVDKTRYVTMGADKFRFGNGSGGHEKIADELDAVGFNYSEDNYKALRAKHPKWLIYGSETSSATRTRGSYYRPERELKHSNGPERNYEQSDYGNDRVGWGKTATASWTFDRDNAGYAGQFIWTGTDYIGEPTPWHNQNQTPVKSSYFGIVDTAGIPKHDFYLYQSQWVSVKKKPMVHLLPHWNWENKELASKVADSEGKIPVRAYSNASSVELFLNGKSLGLKTFNKKQTSDGRTYQEGANANELYLEWKVAYQPGTLEAIARDESGKEIARDKITTAGKPAAVRLIKEDHAIAADGKDLTYIYYEIVDSQGNVVPTANNLVRFQLHGQGQLVGVDNGEQASRERYKAQADGSWIRKAFNGKGVAIVKSTEQAGKFTLTAHSDLLKSNQVTVFTGKKEGQEKTVLGTEVPKVQTIIGEAPEMPTTVPFVYSDGSRAERPVTWSSVDVSKPGIVTVKGMADGREVEARVEVIALKSELPVVKRIAPNTDLNSVDKSVSYVLIDGSVEEYEVDKWEIAEEDKAKAAALEHHHHHH

SEQ ID NO: 197 - protein, 1484 aa, Artificial Sequence
  Description of Artificial Sequence: Synthetic hybrid polypeptide
MAETTDDKIAAQDNKISNLTAQQQEAQKQVDQIQEQVSAIQAEQSNLQAENDRLQAESKKLEGEITELSKNIVSRNQSLEKQARSAQTNGAVTSYINTIVNSKSITEAISRVAAMSEIVSANNKMLEQQKADKKAISEKQVANNDAINTVIANQQKLADDAQALTTKQAELKAAELSLAAEKATAEGEKASLLEQKAAAEAEARAAAVAEAAYKEKRASQQQSVLASANTNLTAQVQAVSESAAAPVRAKVRPTYSTNASSYPIGECTWGVKTLAPWAGDYWGNGAQWATSAAAAGFRTGSTPQVGAIACWNDGGYGHVAVVTAVESTTRIQVSESNYAGNRTIGNHRGWFNPTTTSEGFVTYIYADGSGSGGGGIAEEDKAKLAIPGSRIQATGYLEGQPIHATLVVEEGNPAAPAVPTVTVGGEAVTGLTSQKPMQYRTLAYGAKLPEVTASAKNAAVTVLQASAANGMRASIFIQPKDGGPLQTYAIQFLEEAPKIAHLSLQVEKADSLKEDQTVKLSVRAHYQDGTQAVLPADKVTFSTSGEGEVAIRKGMLELHKPGAVTLNAEYEGAKDQVELTIQANTEKKIAQSIRPVNVVTDLHQEPSLPATVTVEYDKGFPKTHKVTWQAIPKEKLDSYQTFEVLGKVEGIDLEARAKVSVEGIVSVEEVSVTTPIAEAPQLPESVRTYDSNGHVSSAKVAWDAIRPEQYAKEGVFTVNGRLEGTQLTTKLHVRVSAQTEQGANISDQWTGSELPLAFASDSNPSDPVSNVNDKLISYNNQPANRWTNWNRTNPEASVGVLFGDSGILSKRSVDNLSVGFHEDHGVGVPKSYVIEYYVGKTVPTAPKNPSFVGNEDHVFNDSANWKPVTNLKAPAQLKAGEMNHFSFDKVETYAVRIRMVKADNKRGTSITEVQIFAKQVAAAKQGQTRIQVDGKDLANFNPDLTDYYLESVDGKVPAVTASVSNNGLATVVPSVREGEPVRVIAKAENGDILGEYRLHFTKDKSLLSHKPVAAVKQARLLQVGQALELPTKVPVYFTGKDGYETKDLTVEWEEVPAENLTKAGQFTVRGRVLGSNLVAEITVRVTDKLGETLSDNPNYDENSNQAFASATNDIDKNSHDRVDYLNDGDHSENRRWTNWSPTPSSNPEVSAGVIFRENGKIVERTVTQGKVQFFADSGTDAPSKLVLERYVGPEFEVPTYYSNYQAYDADHPFNNPENWEAVPYRADKDIAAGDEINVTFKAIKAKAMRWRMERKADKSGVAMIEMTFLAPSELPQESTQSKILVDGKELADFAENRQDYQITYKGQRPKVSVEENNQVASTVVDSGEDSFPVLVRLVSESGKQVKEYRIHLTKEKPVSEKTVAAVQEDLPKIEFVEKDLAYKTVEKKDSTLYLGETRVEQEGKVGKERIFTAINPDGSKEEKLREVVEVPTDRIVLVGTKPVAQEAKKPQVSEKADTKPIDSSEASQTNKAQAAALEHHHHHH

SEQ ID NO: 198 - protein, 1209 aa, Artificial Sequence
  Description of Artificial Sequence: Synthetic hybrid polypeptide
MASAETTDDKIAAQDNKISNLTAQQQEAQKQVDQIQEQVSAIQAEQSNLQAENDRLQAESKKLEGEITELSKNIVSRNQSLEKQARSAQTNGAVTSYINTIVNSKSITEAISRVAAMSEIVSANNKMLEQQKADKKAISEKQVANNDAINTVIANQQKLADDAQALTTKQAELKAAELSLAAEKATAEGEKASLLEQKAAAEAEARAAAVAEAAYKEKRASQQQSVLASANTNLTAQVQAVSESAAAPVRAKVRPTYSTNASSYPIGECTWGVKTLAPWAGDYWGNGAQWATSAAAAGFRTGSTPQVGAIACWNDGGYGHVAVVTAVESTTRIQVSESNYAGNRTIGNHRGWFNPTTTSEGFVTYIYADGSGSGGGGETPETSPAIGKVVIKETGEGGALLGDAVFELKNNTDGTTVSQRTEAQTGEAIFSNIKPGTYTLTEAQPPVGYKPSTKQWTVEVEKNGRTTVQGEQVENREEALSDQYPQTGTYPDVQTPYQIIKVDGSEKNGQHKALNPNPYERVIPEGTLSKRIYQVNNLDDNQYGIELTVSGKTVYEQKDKSVPLDVVILLDNSNSMSNIRNKNARRAERAGEATRSLIDKITSDSENRVALVTYASTIFDGTEFTVEKGVADKNGKRLNDSLFWNYDQTSFTTNTKDYSYLKLTNDKNDIVELKNKVPTEAEDHDGNRLMYQFGATFTQKALMKADEILTQQARQNSQKVIFHITDGVPTMSYPINFNHATFAPSYQNQLNAFFSKSPNKDGILLSDFITQATSGEHTIVRGDGQSYQMFTDKTVYEKGAPAAFPVKPEKYSEMKAAGYAVIGDPINGGYIWLNWRESILAYPFNSNTAKITNHGDPTRWYYNGNIAPDGYDVFTVGIGINGDPGTDEATATSFMQSISSKPENYTNVTDTTKILEQLNRYFHTIVTEKKSIENGTITDPMGELIDLQLGTDGRFDPADYTLTANDGSRLENGQAVGGPQNDGGLLKNAKVLYDTTEKRIRVTGLYLGTDEKVTLTYNVRLNDEFVSNKFYDTNGRTTLHPKEVEQNTVRDFPIPKIRDVRKYPEITISKEKKLGDIEFIKVNKNDKKPLRGAVFSLQKQHPDYPDIYGAIDQNGTYQNVRTGEDGKLTFKNLSDGKYRLFENSEPAGYKPVQNKPIVAFQIVNGEVRDVTSIVPQDIPAGYEFTNDKHYITNEPIPPKRELEHHHHHH

SEQ ID NO: 199 - protein, 1633 aa, Artificial Sequence
  Description of Artificial Sequence: Synthetic hybrid polypeptide
MADGVTPTTTENQPTIHTVSDSPQSSENRTEETPKAVLQPEAPKTVETETPATDKVASLPKTEEKPQEEVSSTPSDKAEVVTPTSAEKETANKKAEEASPKKEEAKEVDSKESNTDKTDKDKPAKKDEAKAEADKPATEAGKERAATVNEKLAKKKIVSIDAGRKYFSPEQLKEIIDKAKHYGYTDLHLLVGNDGLRFMLDDMSITANGKTYASDDVKRAIEKGTNDYYNDPNGNHLTESQMTDLINYAKDKGIGLIPTVNSPGHMDAILNAMKELGIQNPNFSYFGKKSARTVDLDNEQAVAFTKALIDKYAAYFAKKTEIFNIGLDEYANDATDAKGWSVLQADKYYPNEGYPVKGYEKFIAYANDLARIVKSHGLKPMAFNDGIYYNSDTSFGSFDKDIIVSMWTGGWGGYDVASSKLLAEKGHQILNTNDAWYYVLGRNADGQGWYNLDQGLNGIKNTPITSVPKTEGADIPIIGGMVAAWADTPSARYSPSRLFKLMRHFANANAEYFAADYESAEQALNEVPKDLNRYTAESVTAVKEAEKAIRSLDSNLSRAQQDTIDQAIAKLQETVNNLTLTPEAQKEEEAKREVEKLAKNKVISIDAGRKYFTLNQLKRIVDKASELGYSDVHLLLGNDGLRFLLDDMTITANGKTYASDDVKKAIIEGTKAYYDDPNGTALTQAEVTELIEYAKSKDIGLIPAINSPGHMDAMLVAMEKLGIKNPQAHFDKVSKTTMDLKNEEAMNFVKALIGKYMDFFAGKTKIFNFGTDEYANDATSAQGWYYLKWYQLYGKFAEYANTLAAMAKERGLQPMAFNDGFYYEDKDDVQFDKDVLISYWSKGWWGYNLASPQYLASKGYKFLNTNGDWYYILGQKPEDGGGFLKKAIENTGKTPFNQLASTKYPEVDLPTVGSMLSIWADRPSAEYKEEEIFELMTAFADHNKDYFRANYNALREELAKIPTNLEGYSKESLEALDAAKTALNYNLNRNKQAELDTLVANLKAALQGLKPAVTHSGSLDENEVAANVETRPELITRTEEIPFEVIKKENPNLPAGQENIITAGVKGERTHYISVLTENGKTTETVLDSQVTKEVINQVVEVGAPVTHKGDESGLAPTTEVKPRLDIQEEEIPFTTVTCENPLLLKGKTQVITKGVNGHRSNFYSVSTSADGKEVKTLVNSVVAQEAVTQIVEVGTMVTHVGDENGQAAIAEEKPKLEIPSQPAPSTAPAEESKVLPQDPAPVVTEKKGSGSGGGGAETTDDKIAAQDNKISNLTAQQQEAQKQVDQIQEQVSAIQAEQSNLQAENDRLQAESKKLEGEITELSKNIVSRNQSLEKQARSAQTNGAVTSYINTIVNSKSITEAISRVAAMSEIVSANNKMLEQQKADKKAISEKQVANNDAINTVIANQQKLADDAQALTTKQAELKAAELSLAAEKATAEGEKASLLEQKAAAEAEARAAAVAEAAYKEKRASQQQSVLASANTNLTAQVQAVSESAAAPVRAKVRPTYSTNASSYPIGECTWGVKTLAPWAGDYWGNGAQWATSAAAAGFRTGSTPQVGAIACWNDGGYGHVAVVTAVESTTRIQVSESNYAGNRTIGNHRGWFNPTTTSEGFVTYIYADAAALEHHHHHH

SEQ ID NO: 200 - protein, 1433 aa, Artificial Sequence
  Description of Artificial Sequence: Synthetic hybrid polypeptide
MADGVTPTTTENQPTIHTVSDSPQSSENRTEETPKAVLQPEAPKTVETETPATDKVASLPKTEEKPQEEVSSTPSDKAEVVTPTSAEKETANKKAEEASPKKEEAKEVDSKESNTDKTDKDKPAKKDEAKAEADKPATEAGKERAATVNEKLAKKKIVSIDAGRKYFSPEQLKEIIDKAKHYGYTDLHLLVGNDGLRFMLDDMSITANGKTYASDDVKRAIEKGTNDYYNDPNGNHLTESQMTDLINYAKDKGIGLIPTVNSPGHMDAILNAMKELGIQNPNFSYFGKKSARTVDLDNEQAVAFTKALIDKYAAYFAKKTEIFNIGLDEYANDATDAKGWSVLQADKYYPNEGYPVKGYEKFIAYANDLARIVKSHGLKPMAFNDGIYYNSDTSFGSFDKDIIVSMWTGGWGGYDVASSKLLAEKGHQILNTNDAWYYVLGRNADGQGWYNLDQGLNGIKNTPITSVPKTEGADIPIIGGMVAAWADTPSARYSPSRLFKLMRHFANANAEYFAADYESAEQALNEVPKDLNRYTAESVTAVKEAEKAIRSLDSNLSRAQQDTIDQAIAKLQETVNNLTLTPEAQKEEEAKREVEKLAKNKVISIDAGRKYFTLNQLKRIVDKASELGYSDVHLLLGNDGLRFLLDDMTITANGKTYASDDVKKAIIEGTKAYYDDPNGTALTQAEVTELIEYAKSKDIGLIPAINSPGHMDAMLVAMEKLGIKNPQAHFDKVSKTTMDLKNEEAMNFVKALIGKYMDFFAGKTKIFNFGTDEYANDATSAQGWYYLKWYQLYGKFAEYANTLAAMAKERGLQPMAFNDGFYYEDKDDVQFDKDVLISYWSKGWWGYNLASPQYLASKGYKFLNTNGDWYYILGQKPEDGGGFLKKAIENTGKTPFNQLASTKYPEVDLPTVGSMLSIWADRPSAEYKEEEIFELMTAFADHNKDYFRANYNALREELAKIPTNLEGYSKESLEALDAAKTALNYNLNRNKQAELDTLVANLKAALQGLKPAVTHSGSLDENEVAANVETRPELITRTEEIPFEVIKKENPNLPAGQENIITAGVKGERTHYISVLTENGKTTETVLDSQVTKEVINQVVEVGAPVTHKGDESGLAPTTEVKPRLDIQEEEIPFTTVTCENPLLLKGKTQVITKGVNGHRSNFYSVSTSADGKEVKTLVNSVVAQEAVTQIVEVGTMVTHVGDENGQAAIAEEKPKLEIPSQPAPSTAPAEESKVLPQDPAPVVTEKKGSGSGGGGVSAQESSTYTVKEGDTLSEIAETHNTTVEKLAENNHIDNIHLIYVDQELVIDGPVAPVATPAPATYAAPAAQDETVSAPVAETPVVSETVVSTVSGSEAEAKEWIAQKESGGSYTATNGRYIGRYQLTDSYLNGDYSAENQERVADAYVAGRYGSWTAAKNFWLNNGWYLEHHHHHH

SEQ ID NO: 201 - protein, 2088 aa, Artificial Sequence
  Description of Artificial Sequence: Synthetic hybrid polypeptide
MADGVTPTTTENQPTIHTVSDSPQSSENRTEETPKAVLQPEAPKTVETETPATDKVASLPKTEEKPQEEVSSTPSDKAEVVTPTSAEKETANKKAEEASPKKEEAKEVDSKESNTDKTDKDKPAKKDEAKAEADKPATEAGKERAATVNEKLAKKKIVSIDAGRKYFSPEQLKEIIDKAKHYGYTDLHLLVGNDGLRFMLDDMSITANGKTYASDDVKRAIEKGTNDYYNDPNGNHLTESQMTDLINYAKDKGIGLIPTVNSPGHMDAILNAMKELGIQNPNFSYFGKKSARTVDLDNEQAVAFTKALIDKYAAYFAKKTEIFNIGLDEYANDATDAKGWSVLQADKYYPNEGYPVKGYEKFIAYANDLARIVKSHGLKPMAFNDGIYYNSDTSFGSFDKDIIVSMWTGGWGGYDVASSKLLAEKGHQILNTNDAWYYVLGRNADGQGWYNLDQGLNGIKNTPITSVPKTEGADIPIIGGMVAAWADTPSARYSPSRLFKLMRHFANANAEYFAADYESAEQALNEVPKDLNRYTAESVTAVKEAEKAIRSLDSNLSRAQQDTIDQAIAKLQETVNNLTLTPEAQKEEEAKREVEKLAKNKVISIDAGRKYFTLNQLKRIVDKASELGYSDVHLLLGNDGLRFLLDDMTITANGKTYASDDVKKAIIEGTKAYYDDPNGTALTQAEVTELIEYAKSKDIGLIPAINSPGHMDAMLVAMEKLGIKNPQAHFDKVSKTTMDLKNEEAMNFVKALIGKYMDFFAGKTKIFNFGTDEYANDATSAQGWYYLKWYQLYGKFAEYANTLAAMAKERGLQPMAFNDGFYYEDKDDVQFDKDVLISYWSKGWWGYNLASPQYLASKGYKFLNTNGDWYYILGQKPEDGGGFLKKAIENTGKTPFNQLASTKYPEVDLPTVGSMLSIWADRPSAEYKEEEIFELMTAFADHNKDYFRANYNALREELAKIPTNLEGYSKESLEALDAAKTALNYNLNRNKQAELDTLVANLKAALQGLKPAVTHSGSLDENEVAANVETRPELITRTEEIPFEVIKKENPNLPAGQENIITAGVKGERTHYISVLTENGKTTETVLDSQVTKEVINQVVEVGAPVTHKGDESGLAPTTEVKPRLDIQEEEIPFTTVTCENPLLLKGKTQVITKGVNGHRSNFYSVSTSADGKEVKTLVNSVVAQEAVTQIVEVGTMVTHVGDENGQAAIAEEKPKLEIPSQPAPSTAPAEESKVLPQDPAPVVTEKKGSGSGGGGETPETSPAIGKVVIKETGEGGALLGDAVFELKNNTDGTTVSQRTEAQTGEAIFSNIKPGTYTLTEAQPPVGYKPSTKQWTVEVEKNGRTTVQGEQVENREEALSDQYPQTGTYPDVQTPYQIIKVDGSEKNGQHKALNPNPYERVIPEGTLSKRIYQVNNLDDNQYGIELTVSGKTVYEQKDKSVPLDVVILLDNSNSMSNIRNKNARRAERAGEATRSLIDKITSDSENRVALVTYASTIFDGTEFTVEKGVADKNGKRLNDSLFWNYDQTSFTTNTKDYSYLKLTNDKNDIVELKNKVPTEAEDHDGNRLMYQFGATFTQKALMKADEILTQQARQNSQKVIFHITDGVPTMSYPINFNHATFAPSYQNQLNAFFSKSPNKDGILLSDFITQATSGEHTIVRGDGQSYQMFTDKTVYEKGAPAAFPVKPEKYSEMKAAGYAVIGDPINGGYIWLNWRESILAYPFNSNTAKITNHGDPTRWYYNGNIAPDGYDVFTVGIGINGDPGTDEATATSFMQSISSKPENYTNVTDTTKILEQLNRYFHTIVTEKKSIENGTITDPMGELIDLQLGTDGRFDPADYTLTANDGSRLENGQAVGGPQNDGGLLKNAKVLYDTTEKRIRVTGLYLGTDEKVTLTYNVRLNDEFVSNKFYDTNGRTTLHPKEVEQNTVRDFPIPKIRDVRKYPEITISKEKKLGDIEFIKVNKNDKKPLRGAVFSLQKQHPDYPDIYGAIDQNGTYQNVRTGEDGKLTFKNLSDGKYRLFENSEPAGYKPVQNKPIVAFQIVNGEVRDVTSIVPQDIPAGYEFTNDKHYITNEPIPPKRELEHHHHHH

SEQ ID NO: 202 - protein, 3420 aa, Artificial Sequence
  Description of Artificial Sequence: Synthetic hybrid polypeptide
MADGVTPTTTENQPTIHTVSDSPQSSENRTEETPKAVLQPEAPKTVETETPATDKVASLPKTEEKPQEEVSSTPSDKAEVVTPTSAEKETANKKAEEASPKKEEAKEVDSKESNTDKTDKDKPAKKDEAKAEADKPATEAGKERAATVNEKLAKKKIVSIDAGRKYFSPEQLKEIIDKAKHYGYTDLHLLVGNDGLRFMLDDMSITANGKTYASDDVKRAIEKGTNDYYNDPNGNHLTESQMTDLINYAKDKGIGLIPTVNSPGHMDAILNAMKELGIQNPNFSYFGKKSARTVDLDNEQAVAFTKALIDKYAAYFAKKTEIFNIGLDEYANDATDAKGWSVLQADKYYPNEGYPVKGYEKFIAYANDLARIVKSHGLKPMAFNDGIYYNSDTSFGSFDKDIIVSMWTGGWGGYDVASSKLLAEKGHQILNTNDAWYYVLGRNADGQGWYNLDQGLNGIKNTPITSVPKTEGADIPIIGGMVAAWADTPSARYSPSRLFKLMRHFANANAEYFAADYESAEQALNEVPKDLNRYTAESVTAVKEAEKAIRSLDSNLSRAQQDTIDQAIAKLQETVNNLTLTPEAQKEEEAKREVEKLAKNKVISIDAGRKYFTLNQLKRIVDKASELGYSDVHLLLGNDGLRFLLDDMTITANGKTYASDDVKKAIIEGTKAYYDDPNGTALTQAEVTELIEYAKSKDIGLIPAINSPGHMDAMLVAMEKLGIKNPQAHFDKVSKTTMDLKNEEAMNFVKALIGKYMDFFAGKTKIFNFGTDEYANDATSAQGWYYLKWYQLYGKFAEYANTLAAMAKERGLQPMAFNDGFYYEDKDDVQFDKDVLISYWSKGWWGYNLASPQYLASKGYKFLNTNGDWYYILGQKPEDGGGFLKKAIENTGKTPFNQLASTKYPEVDLPTVGSMLSIWADRPSAEYKEEEIFELMTAFADHNKDYFRANYNALREELAKIPTNLEGYSKESLEALDAAKTALNYNLNRNKQAELDTLVANLKAALQGLKPAVTHSGSLDENEVAANVETRPELITRTEEIPFEVIKKENPNLPAGQENIITAGVKGERTHYISVLTENGKTTETVLDSQVTKEVINQVVEVGAPVTHKGDESGLAPTTEVKPRLDIQEEEIPFTTVTCENPLLLKGKTQVITKGVNGHRSNFYSVSTSADGKEVKTLVNSVVAQEAVTQIVEVGTMVTHVGDENGQAAIAEEKPKLEIPSQPAPSTAPAEESKVLPQDPAPVVTEKKGSGSGGGGDETLITHTAEKPKEEKMIVEEKADKALETKNIVERTEQSEPSSTEAIASEKKEDEAVTPKEEKVSAKPEEKAPRIESQASNQEKPLKEDAKAVTNEEVNQMIEDRKVDFNQNWYFKLNANSKEAIKPDADVSTWKKLDLPYDWSIFNDFDHESPAQNEGGQLNGGEAWYRKTFKLDEKDLKKNVRLTFDGVYMDSQVYVNGQLVGHYPNGYNQFSYDITKYLQKDGRENVIAVHAVNKQPSSRWYSGSGIYRDVTLQVTDKVHVEKNGTTILTPKLEEQQHGKVETHVTSKIVNTDDKDHELVAEYQIVERGGHAVTGLVRTASRTLKAHESTSLDAILEVERPKLWTVLNDKPALYELITRVYRDGQLVDAKKDLFGYRYYHWTPNEGFSLNGERIKFHGVSLHHDHGALGAEENYKAEYRRLKQMKEMGVNSIRTTHNPASEQTLQIAAELGLLVQEEAFDTWYGGKKPYDYGRFFEKDATHPEARKGEKWSDFDLRTMVERGKNNPAIFMWSIGNEIGEANGDAHSLATVKRLVKVIKDVDKTRYVTMGADKFRFGNGSGGHEKIADELDAVGFNYSEDNYKALRAKHPKWLIYGSETSSATRTRGSYYRPERELKHSNGPERNYEQSDYGNDRVGWGKTATASWTFDRDNAGYAGQFIWTGTDYIGEPTPWHNQNQTPVKSSYFGIVDTAGIPKHDFYLYQSQWVSVKKKPMVHLLPHWNWENKELASKVADSEGKIPVRAYSNASSVELFLNGKSLGLKTFNKKQTSDGRTYQEGANANELYLEWKVAYQPGTLEAIARDESGKEIARDKITTAGKPAAVRLIKEDHAIAADGKDLTYIYYEIVDSQGNVVPTANNLVRFQLHGQGQLVGVDNGEQASRERYKAQADGSWIRKAFNGKGVAIVKSTEQAGKFTLTAHSDLLKSNQVTVFTGKKEGQEKTVLGTEVPKVQTIIGEAPEMPTTVPFVYSDGSRAERPVTWSSVDVSKPGIVTVKGMADGREVEARVEVIALKSELPVVKRIAPNTDLNSVDKSVSYVLIDGSVEEYEVDKWEIAEEDKAKLAIPGSRIQATGYLEGQPIHATLVVEEGNPAAPAVPTVTVGGEAVTGLTSQKPMQYRTLAYGAKLPEVTASAKNAAVTVLQASAANGMRASIFIQPKDGGPLQTYAIQFLEEAPKIAHLSLQVEKADSLKEDQTVKLSVRAHYQDGTQAVLPADKVTFSTSGEGEVAIRKGMLELHKPGAVTLNAEYEGAKDQVELTIQANTEKKIAQSIRPVNVVTDLHQEPSLPATVTVEYDKGFPKTHKVTWQAIPKEKLDSYQTFEVLGKVEGIDLEARAKVSVEGIVSVEEVSVTTPIAEAPQLPESVRTYDSNGHVSSAKVAWDAIRPEQYAKEGVFTVNGRLEGTQLTTKLHVRVSAQTEQGANISDQWTGSELPLAFASDSNPSDPVSNVNDKLISYNNQPANRWTNWNRTNPEASVGVLFGDSGILSKRSVDNLSVGFHEDHGVGVPKSYVIEYYVGKTVPTAPKNPSFVGNEDHVFNDSANWKPVTNLKAPAQLKAGEMNHFSFDKVETYAVRIRMVKADNKRGTSITEVQIFAKQVAAAKQGQTRIQVDGKDLANFNPDLTDYYLESVDGKVPAVTASVSNNGLATVVPSVREGEPVRVIAKAENGDILGEYRLHFTKDKSLLSHKPVAAVKQARLLQVGQALELPTKVPVYFTGKDGYETKDLTVEWEEVPAENLTKAGQFTVRGRVLGSNLVAEITVRVTDKLGETLSDNPNYDENSNQAFASATNDIDKNSHDRVDYLNDGDHSENRRWTNWSPTPSSNPEVSAGVIFRENGKIVERTVTQGKVQFFADSGTDAPSKLVLERYVGPEFEVPTYYSNYQAYDADHPFNNPENWEAVPYRADKDIAAGDEINVTFKAIKAKAMRWRMERKADKSGVAMIEMTFLAPSELPQESTQSKILVDGKELADFAENRQDYQITYKGQRPKVSVEENNQVASTVVDSGEDSFPVLVRLVSESGKQVKEYRIHLTKEKPVSEKTVAAVQEDLPKIEFVEKDLAYKTVEKKDSTLYLGETRVEQEGKVGKERIFTAINPDGSKEEKLREVVEVPTDRIVLVGTKPVAQEAKKPQVSEKADTKPIDSSEASQTNKAQAAALEHHHHHH

SEQ ID NO: 203 - protein, 2330 aa, Artificial Sequence
  Description of Artificial Sequence: Synthetic hybrid polypeptide
MADGVTPTTTENQPTIHTVSDSPQSSENRTEETPKAVLQPEAPKTVETETPATDKVASLPKTEEKPQEEVSSTPSDKAEVVTPTSAEKETANKKAEEASPKKEEAKEVDSKESNTDKTDKDKPAKKDEAKAEADKPATEAGKERAATVNEKLAKKKIVSIDAGRKYFSPEQLKEIIDKAKHYGYTDLHLLVGNDGLRFMLDDMSITANGKTYASDDVKRAIEKGTNDYYNDPNGNHLTESQMTDLINYAKDKGIGLIPTVNSPGHMDAILNAMKELGIQNPNFSYFGKKSARTVDLDNEQAVAFTKALIDKYAAYFAKKTEIFNIGLDEYANDATDAKGWSVLQADKYYPNEGYPVKGYEKFIAYANDLARIVKSHGLKPMAFNDGIYYNSDTSFGSFDKDIIVSMWTGGWGGYDVASSKLLAEKGHQILNTNDAWYYVLGRNADGQGWYNLDQGLNGIKNTPITSVPKTEGADIPIIGGMVAAWADTPSARYSPSRLFKLMRHFANANAEYFAADYESAEQALNEVPKDLNRYTAESVTAVKEAEKAIRSLDSNLSRAQQDTIDQAIAKLQETVNNLTLTPEAQKEEEAKREVEKLAKNKVISIDAGRKYFTLNQLKRIVDKASELGYSDVHLLLGNDGLRFLLDDMTITANGKTYASDDVKKAIIEGTKAYYDDPNGTALTQAEVTELIEYAKSKDIGLIPAINSPGHMDAMLVAMEKLGIKNPQAHFDKVSKTTMDLKNEEAMNFVKALIGKYMDFFAGKTKIFNFGTDEYANDATSAQGWYYLKWYQLYGKFAEYANTLAAMAKERGLQPMAFNDGFYYEDKDDVQFDKDVLISYWSKGWWGYNLASPQYLASKGYKFLNTNGDWYYILGQKPEDGGGFLKKAIENTGKTPFNQLASTKYPEVDLPTVGSMLSIWADRPSAEYKEEEIFELMTAFADHNKDYFRANYNALREELAKIPTNLEGYSKESLEALDAAKTALNYNLNRNKQAELDTLVANLKAALQGLKPAVTHSGSLDENEVAANVETRPELITRTEEIPFEVIKKENPNLPAGQENIITAGVKGERTHYISVLTENGKTTETVLDSQVTKEVINQVVEVGAPVTHKGDESGLAPTTEVKPRLDIQEEEIPFTTVTCENPLLLKGKTQVITKGVNGHRSNFYSVSTSADGKEVKTLVNSVVAQEAVTQIVEVGTMVTHVGDENGQAAIAEEKPKLEIPSQPAPSTAPAEESKVLPQDPAPVVTEKKGSGSGGGGDETLITHTAEKPKEEKMIVEEKADKALETKNIVERTEQSEPSSTEAIASEKKEDEAVTPKEEKVSAKPEEKAPRIESQASNQEKPLKEDAKAVTNEEVNQMIEDRKVDFNQNWYFKLNANSKEAIKPDADVSTWKKLDLPYDWSIFNDFDHESPAQNEGGQLNGGEAWYRKTFKLDEKDLKKNVRLTFDGVYMDSQVYVNGQLVGHYPNGYNQFSYDITKYLQKDGRENVIAVHAVNKQPSSRWYSGSGIYRDVTLQVTDKVHVEKNGTTILTPKLEEQQHGKVETHVTSKIVNTDDKDHELVAEYQIVERGGHAVTGLVRTASRTLKAHESTSLDAILEVERPKLWTVLNDKPALYELITRVYRDGQLVDAKKDLFGYRYYHWTPNEGFSLNGERIKFHGVSLHHDHGALGAEENYKAEYRRLKQMKEMGVNSIRTTHNPASEQTLQIAAELGLLVQEEAFDTWYGGKKPYDYGRFFEKDATHPEARKGEKWSDFDLRTMVERGKNNPAIFMWSIGNEIGEANGDAHSLATVKRLVKVIKDVDKTRYVTMGADKFRFGNGSGGHEKIADELDAVGFNYSEDNYKALRAKHPKWLIYGSETSSATRTRGSYYRPERELKHSNGPERNYEQSDYGNDRVGWGKTATASWTFDRDNAGYAGQFIWTGTDYIGEPTPWHNQNQTPVKSSYFGIVDTAGIPKHDFYLYQSQWVSVKKKPMVHLLPHWNWENKELASKVADSEGKIPVRAYSNASSVELFLNGKSLGLKTFNKKQTSDGRTYQEGANANELYLEWKVAYQPGTLEAIARDESGKEIARDKITTAGKPAAVRLIKEDHAIAADGKDLTYIYYEIVDSQGNVVPTANNLVRFQLHGQGQLVGVDNGEQASRERYKAQADGSWIRKAFNGKGVAIVKSTEQAGKFTLTAHSDLLKSNQVTVFTGKKEGQEKTVLGTEVPKVQTIIGEAPEMPTTVPFVYSDGSRAERPVTWSSVDVSKPGIVTVKGMADGREVEARVEVIALKSELPVVKRIAPNTDLNSVDKSVSYVLIDGSVEEYEVDKWEIAEEDKAKAAALEHHHHHH

SEQ ID NO: 204 - protein, 2365 aa, Artificial Sequence
  Description of Artificial Sequence: Synthetic hybrid polypeptide
MADGVTPTTTENQPTIHTVSDSPQSSENRTEETPKAVLQPEAPKTVETETPATDKVASLPKTEEKPQEEVSSTPSDKAEVVTPTSAEKETANKKAEEASPKKEEAKEVDSKESNTDKTDKDKPAKKDEAKAEADKPATEAGKERAATVNEKLAKKKIVSIDAGRKYFSPEQLKEIIDKAKHYGYTDLHLLVGNDGLRFMLDDMSITANGKTYASDDVKRAIEKGTNDYYNDPNGNHLTESQMTDLINYAKDKGIGLIPTVNSPGHMDAILNAMKELGIQNPNFSYFGKKSARTVDLDNEQAVAFTKALIDKYAAYFAKKTEIFNIGLDEYANDATDAKGWSVLQADKYYPNEGYPVKGYEKFIAYANDLARIVKSHGLKPMAFNDGIYYNSDTSFGSFDKDIIVSMWTGGWGGYDVASSKLLAEKGHQILNTNDAWYYVLGRNADGQGWYNLDQGLNGIKNTPITSVPKTEGADIPIIGGMVAAWADTPSARYSPSRLFKLMRHFANANAEYFAADYESAEQALNEVPKDLNRYTAESVTAVKEAEKAIRSLDSNLSRAQQDTIDQAIAKLQETVNNLTLTPEAQKEEEAKREVEKLAKNKVISIDAGRKYFTLNQLKRIVDKASELGYSDVHLLLGNDGLRFLLDDMTITANGKTYASDDVKKAIIEGTKAYYDDPNGTALTQAEVTELIEYAKSKDIGLIPAINSPGHMDAMLVAMEKLGIKNPQAHFDKVSKTTMDLKNEEAMNFVKALIGKYMDFFAGKTKIFNFGTDEYANDATSAQGWYYLKWYQLYGKFAEYANTLAAMAKERGLQPMAFNDGFYYEDKDDVQFDKDVLISYWSKGWWGYNLASPQYLASKGYKFLNTNGDWYYILGQKPEDGGGFLKKAIENTGKTPFNQLASTKYPEVDLPTVGSMLSIWADRPSAEYKEEEIFELMTAFADHNKDYFRANYNALREELAKIPTNLEGYSKESLEALDAAKTALNYNLNRNKQAELDTLVANLKAALQGLKPAVTHSGSLDENEVAANVETRPELITRTEEIPFEVIKKENPNLPAGQENIITAGVKGERTHYISVLTENGKTTETVLDSQVTKEVINQVVEVGAPVTHKGDESGLAPTTEVKPRLDIQEEEIPFTTVTCENPLLLKGKTQVITKGVNGHRSNFYSVSTSADGKEVKTLVNSVVAQEAVTQIVEVGTMVTHVGDENGQAAIAEEKPKLEIPSQPAPSTAPAEESKVLPQDPAPVVTEKKGSGSGGGGIAEEDKAKLAIPGSRIQATGYLEGQPIHATLVVEEGNPAAPAVPTVTVGGEAVTGLTSQKPMQYRTLAYGAKLPEVTASAKNAAVTVLQASAANGMRASIFIQPKDGGPLQTYAIQFLEEAPKIAHLSLQVEKADSLKEDQTVKLSVRAHYQDGTQAVLPADKVTFSTSGEGEVAIRKGMLELHKPGAVTLNAEYEGAKDQVELTIQANTEKKIAQSIRPVNVVTDLHQEPSLPATVTVEYDKGFPKTHKVTWQAIPKEKLDSYQTFEVLGKVEGIDLEARAKVSVEGIVSVEEVSVTTPIAEAPQLPESVRTYDSNGHVSSAKVAWDAIRPEQYAKEGVFTVNGRLEGTQLTTKLHVRVSAQTEQGANISDQWTGSELPLAFASDSNPSDPVSNVNDKLISYNNQPANRWTNWNRTNPEASVGVLFGDSGILSKRSVDNLSVGFHEDHGVGVPKSYVIEYYVGKTVPTAPKNPSFVGNEDHVFNDSANWKPVTNLKAPAQLKAGEMNHFSFDKVETYAVRIRMVKADNKRGTSITEVQIFAKQVAAAKQGQTRIQVDGKDLANFNPDLTDYYLESVDGKVPAVTASVSNNGLATVVPSVREGEPVRVIAKAENGDILGEYRLHFTKDKSLLSHKPVAAVKQARLLQVGQALELPTKVPVYFTGKDGYETKDLTVEWEEVPAENLTKAGQFTVRGRVLGSNLVAEITVRVTDKLGETLSDNPNYDENSNQAFASATNDIDKNSHDRVDYLNDGDHSENRRWTNWSPTPSSNPEVSAGVIFRENGKIVERTVTQGKVQFFADSGTDAPSKLVLERYVGPEFEVPTYYSNYQAYDADHPFNNPENWEAVPYRADKDIAAGDEINVTFKAIKAKAMRWRMERKADKSGVAMIEMTFLAPSELPQESTQSKILVDGKELADFAENRQDYQITYKGQRPKVSVEENNQVASTVVDSGEDSFPVLVRLVSESGKQVKEYRIHLTKEKPVSEKTVAAVQEDLPKIEFVEKDLAYKTVEKKDSTLYLGETRVEQEGKVGKERIFTAINPDGSKEEKLREVVEVPTDRIVLVGTKPVAQEAKKPQVSEKADTKPIDSSEASQTNKAQAAALEHHHHHH

SEQ ID NO: 205 - protein, 555 aa, Artificial Sequence
  Description of Artificial Sequence: Synthetic hybrid polypeptide
MVSAQESSTYTVKEGDTLSEIAETHNTTVEKLAENNHIDNIHLIYVDQELVIDGPVAPVATPAPATYAAPAAQDETVSAPVAETPVVSETVVSTVSGSEAEAKEWIAQKESGGSYTATNGRYIGRYQLTDSYLNGDYSAENQERVADAYVAGRYGSWTAAKNFWLNNGWYGSGSGGGGAETTDDKIAAQDNKISNLTAQQQEAQKQVDQIQEQVSAIQAEQSNLQAENDRLQAESKKLEGEITELSKNIVSRNQSLEKQARSAQTNGAVTSYINTIVNSKSITEAISRVAAMSEIVSANNKMLEQQKADKKAISEKQVANNDAINTVIANQQKLADDAQALTTKQAELKAAELSLAAEKATAEGEKASLLEQKAAAEAEARAAAVAEAAYKEKRASQQQSVLASANTNLTAQVQAVSESAAAPVRAKVRPTYSTNASSYPIGECTWGVKTLAPWAGDYWGNGAQWATSAAAAGFRTGSTPQVGAIACWNDGGYGHVAVVTAVESTTRIQVSESNYAGNRTIGNHRGWFNPTTTSEGFVTYIYADAAALEHHHHHH

SEQ ID NO: 206 - protein, 1433 aa, Artificial Sequence
  Description of Artificial Sequence: Synthetic hybrid polypeptide
MVSAQESSTYTVKEGDTLSEIAETHNTTVEKLAENNHIDNIHLIYVDQELVIDGPVAPVATPAPATYAAPAAQDETVSAPVAETPVVSETVVSTVSGSEAEAKEWIAQKESGGSYTATNGRYIGRYQLTDSYLNGDYSAENQERVADAYVAGRYGSWTAAKNFWLNNGWYGSGSGGGGADGVTPTTTENQPTIHTVSDSPQSSENRTEETPKAVLQPEAPKTVETETPATDKVASLPKTEEKPQEEVSSTPSDKAEVVTPTSAEKETANKKAEEASPKKEEAKEVDSKESNTDKTDKDKPAKKDEAKAEADKPATEAGKERAATVNEKLAKKKIVSIDAGRKYFSPEQLKEIIDKAKHYGYTDLHLLVGNDGLRFMLDDMSITANGKTYASDDVKRAIEKGTNDYYNDPNGNHLTESQMTDLINYAKDKGIGLIPTVNSPGHMDAILNAMKELGIQNPNFSYFGKKSARTVDLDNEQAVAFTKALIDKYAAYFAKKTEIFNIGLDEYANDATDAKGWSVLQADKYYPNEGYPVKGYEKFIAYANDLARIVKSHGLKPMAFNDGIYYNSDTSFGSFDKDIIVSMWTGGWGGYDVASSKLLAEKGHQILNTNDAWYYVLGRNADGQGWYNLDQGLNGIKNTPITSVPKTEGADIPIIGGMVAAWADTPSARYSPSRLFKLMRHFANANAEYFAADYESAEQALNEVPKDLNRYTAESVTAVKEAEKAIRSLDSNLSRAQQDTIDQAIAKLQETVNNLTLTPEAQKEEEAKREVEKLAKNKVISIDAGRKYFTLNQLKRIVDKASELGYSDVHLLLGNDGLRFLLDDMTITANGKTYASDDVKKAIIEGTKAYYDDPNGTALTQAEVTELIEYAKSKDIGLIPAINSPGHMDAMLVAMEKLGIKNPQAHFDKVSKTTMDLKNEEAMNFVKALIGKYMDFFAGKTKIFNFGTDEYANDATSAQGWYYLKWYQLYGKFAEYANTLAAMAKERGLQPMAFNDGFYYEDKDDVQFDKDVLISYWSKGWWGYNLASPQYLASKGYKFLNTNGDWYYILGQKPEDGGGFLKKAIENTGKTPFNQLASTKYPEVDLPTVGSMLSIWADRPSAEYKEEEIFELMTAFADHNKDYFRANYNALREELAKIPTNLEGYSKESLEALDAAKTALNYNLNRNKQAELDTLVANLKAALQGLKPAVTHSGSLDENEVAANVETRPELITRTEEIPFEVIKKENPNLPAGQENIITAGVKGERTHYISVLTENGKTTETVLDSQVTKEVINQVVEVGAPVTHKGDESGLAPTTEVKPRLDIQEEEIPFTTVTCENPLLLKGKTQVITKGVNGHRSNFYSVSTSADGKEVKTLVNSVVAQEAVTQIVEVGTMVTHVGDENGQAAIAEEKPKLEIPSQPAPSTAPAEESKVLPQDPAPVVTEKKLEHHHHHH

SEQ ID NO: 207 - protein, 1010 aa, Artificial Sequence
  Description of Artificial Sequence: Synthetic hybrid polypeptide
MVSAQESSTYTVKEGDTLSEIAETHNTTVEKLAENNHIDNIHLIYVDQELVIDGPVAPVATPAPATYAAPAAQDETVSAPVAETPVVSETVVSTVSGSEAEAKEWIAQKESGGSYTATNGRYIGRYQLTDSYLNGDYSAENQERVADAYVAGRYGSWTAAKNFWLNNGWYGSGSGGGGETPETSPAIGKVVIKETGEGGALLGDAVFELKNNTDGTTVSQRTEAQTGEAIFSNIKPGTYTLTEAQPPVGYKPSTKQWTVEVEKNGRTTVQGEQVENREEALSDQYPQTGTYPDVQTPYQIIKVDGSEKNGQHKALNPNPYERVIPEGTLSKRIYQVNNLDDNQYGIELTVSGKTVYEQKDKSVPLDVVILLDNSNSMSNIRNKNARRAERAGEATRSLIDKITSDSENRVALVTYASTIFDGTEFTVEKGVADKNGKRLNDSLFWNYDQTSFTTNTKDYSYLKLTNDKNDIVELKNKVPTEAEDHDGNRLMYQFGATFTQKALMKADEILTQQARQNSQKVIFHITDGVPTMSYPINFNHATFAPSYQNQLNAFFSKSPNKDGILLSDFITQATSGEHTIVRGDGQSYQMFTDKTVYEKGAPAAFPVKPEKYSEMKAAGYAVIGDPINGGYIWLNWRESILAYPFNSNTAKITNHGDPTRWYYNGNIAPDGYDVFTVGIGINGDPGTDEATATSFMQSISSKPENYTNVTDTTKILEQLNRYFHTIVTEKKSIENGTITDPMGELIDLQLGTDGRFDPADYTLTANDGSRLENGQAVGGPQNDGGLLKNAKVLYDTTEKRIRVTGLYLGTDEKVTLTYNVRLNDEFVSNKFYDTNGRTTLHPKEVEQNTVRDFPIPKIRDVRKYPEITISKEKKLGDIEFIKVNKNDKKPLRGAVFSLQKQHPDYPDIYGAIDQNGTYQNVRTGEDGKLTFKNLSDGKYRLFENSEPAGYKPVQNKPIVAFQIVNGEVRDVTSIVPQDIPAGYEFTNDKHYITNEPIPPKRELEHHHHHH

SEQ ID NO: 208 - protein, 2342 aa, Artificial Sequence
  Description of Artificial Sequence: Synthetic hybrid polypeptide
MVSAQESSTYTVKEGDTLSEIAETHNTTVEKLAENNHIDNIHLIYVDQELVIDGPVAPVATPAPATYAAPAAQDETVSAPVAETPVVSETVVSTVSGSEAEAKEWIAQKESGGSYTATNGRYIGRYQLTDSYLNGDYSAENQERVADAYVAGRYGSWTAAKNFWLNNGWYGSGSGGGGDETLITHTAEKPKEEKMIVEEKADKALETKNIVERTEQSEPSSTEAIASEKKEDEAVTPKEEKVSAKPEEKAPRIESQASNQEKPLKEDAKAVTNEEVNQMIEDRKVDFNQNWYFKLNANSKEAIKPDADVSTWKKLDLPYDWSIFNDFDHESPAQNEGGQLNGGEAWYRKTFKLDEKDLKKNVRLTFDGVYMDSQVYVNGQLVGHYPNGYNQFSYDITKYLQKDGRENVIAVHAVNKQPSSRWYSGSGIYRDVTLQVTDKVHVEKNGTTILTPKLEEQQHGKVETHVTSKIVNTDDKDHELVAEYQIVERGGHAVTGLVRTASRTLKAHESTSLDAILEVERPKLWTVLNDKPALYELITRVYRDGQLVDAKKDLFGYRYYHWTPNEGFSLNGERIKFHGVSLHHDHGALGAEENYKAEYRRLKQMKEMGVNSIRTTHNPASEQTLQIAAELGLLVQEEAFDTWYGGKKPYDYGRFFEKDATHPEARKGEKWSDFDLRTMVERGKNNPAIFMWSIGNEIGEANGDAHSLATVKRLVKVIKDVDKTRYVTMGADKFRFGNGSGGHEKIADELDAVGFNYSEDNYKALRAKHPKWLIYGSETSSATRTRGSYYRPERELKHSNGPERNYEQSDYGNDRVGWGKTATASWTFDRDNAGYAGQFIWTGTDYIGEPTPWHNQNQTPVKSSYFGIVDTAGIPKHDFYLYQSQWVSVKKKPMVHLLPHWNWENKELASKVADSEGKIPVRAYSNASSVELFLNGKSLGLKTFNKKQTSDGRTYQEGANANELYLEWKVAYQPGTLEAIARDESGKEIARDKITTAGKPAAVRLIKEDHAIAADGKDLTYIYYEIVDSQGNVVPTANNLVRFQLHGQGQLVGVDNGEQASRERYKAQADGSWIRKAFNGKGVAIVKSTEQAGKFTLTAHSDLLKSNQVTVFTGKKEGQEKTVLGTEVPKVQTIIGEAPEMPTTVPFVYSDGSRAERPVTWSSVDVSKPGIVTVKGMADGREVEARVEVIALKSELPVVKRIAPNTDLNSVDKSVSYVLIDGSVEEYEVDKWEIAEEDKAKLAIPGSRIQATGYLEGQPIHATLVVEEGNPAAPAVPTVTVGGEAVTGLTSQKPMQYRTLAYGAKLPEVTASAKNAAVTVLQASAANGMRASIFIQPKDGGPLQTYAIQFLEEAPKIAHLSLQVEKADSLKEDQTVKLSVRAHYQDGTQAVLPADKVTFSTSGEGEVAIRKGMLELHKPGAVTLNAEYEGAKDQVELTIQANTEKKIAQSIRPVNVVTDLHQEPSLPATVTVEYDKGFPKTHKVTWQAIPKEKLDSYQTFEVLGKVEGIDLEARAKVSVEGIVSVEEVSVTTPIAEAPQLPESVRTYDSNGHVSSAKVAWDAIRPEQYAKEGVFTVNGRLEGTQLTTKLHVRVSAQTEQGANISDQWTGSELPLAFASDSNPSDPVSNVNDKLISYNNQPANRWTNWNRTNPEASVGVLFGDSGILSKRSVDNLSVGFHEDHGVGVPKSYVIEYYVGKTVPTAPKNPSFVGNEDHVFNDSANWKPVTNLKAPAQLKAGEMNHFSFDKVETYAVRIRMVKADNKRGTSITEVQIFAKQVAAAKQGQTRIQVDGKDLANFNPDLTDYYLESVDGKVPAVTASVSNNGLATVVPSVREGEPVRVIAKAENGDILGEYRLHFTKDKSLLSHKPVAAVKQARLLQVGQALELPTKVPVYFTGKDGYETKDLTVEWEEVPAENLTKAGQFTVRGRVLGSNLVAEITVRVTDKLGETLSDNPNYDENSNQAFASATNDIDKNSHDRVDYLNDGDHSENRRWTNWSPTPSSNPEVSAGVIFRENGKIVERTVTQGKVQFFADSGTDAPSKLVLERYVGPEFEVPTYYSNYQAYDADHPFNNPENWEAVPYRADKDIAAGDEINVTFKAIKAKAMRWRMERKADKSGVAMIEMTFLAPSELPQESTQSKILVDGKELADFAENRQDYQITYKGQRPKVSVEENNQVASTVVDSGEDSFPVLVRLVSESGKQVKEYRIHLTKEKPVSEKTVAAVQEDLPKIEFVEKDLAYKTVEKKDSTLYLGETRVEQEGKVGKERIFTAINPDGSKEEKLREVVEVPTDRIVLVGTKPVAQEAKKPQVSEKADTKPIDSSEASQTNKAQAAALEHHHHHH

SEQ ID NO: 209 - protein, 1252 aa, Artificial Sequence
  Description of Artificial Sequence: Synthetic hybrid polypeptide
MVSAQESSTYTVKEGDTLSEIAETHNTTVEKLAENNHIDNIHLIYVDQELVIDGPVAPVATPAPATYAAPAAQDETVSAPVAETPVVSETVVSTVSGSEAEAKEWIAQKESGGSYTATNGRYIGRYQLTDSYLNGDYSAENQERVADAYVAGRYGSWTAAKNFWLNNGWYGSGSGGGGDETLITHTAEKPKEEKMIVEEKADKALETKNIVERTEQSEPSSTEAIASEKKEDEAVTPKEEKVSAKPEEKAPRIESQASNQEKPLKEDAKAVTNEEVNQMIEDRKVDFNQNWYFKLNANSKEAIKPDADVSTWKKLDLPYDWSIFNDFDHESPAQNEGGQLNGGEAWYRKTFKLDEKDLKKNVRLTFDGVYMDSQVYVNGQLVGHYPNGYNQFSYDITKYLQKDGRENVIAVHAVNKQPSSRWYSGSGIYRDVTLQVTDKVHVEKNGTTILTPKLEEQQHGKVETHVTSKIVNTDDKDHELVAEYQIVERGGHAVTGLVRTASRTLKAHESTSLDAILEVERPKLWTVLNDKPALYELITRVYRDGQLVDAKKDLFGYRYYHWTPNEGFSLNGERIKFHGVSLHHDHGALGAEENYKAEYRRLKQMKEMGVNSIRTTHNPASEQTLQIAAELGLLVQEEAFDTWYGGKKPYDYGRFFEKDATHPEARKGEKWSDFDLRTMVERGKNNPAIFMWSIGNEIGEANGDAHSLATVKRLVKVIKDVDKTRYVTMGADKFRFGNGSGGHEKIADELDAVGFNYSEDNYKALRAKHPKWLIYGSETSSATRTRGSYYRPERELKHSNGPERNYEQSDYGNDRVGWGKTATASWTFDRDNAGYAGQFIWTGTDYIGEPTPWHNQNQTPVKSSYFGIVDTAGIPKHDFYLYQSQWVSVKKKPMVHLLPHWNWENKELASKVADSEGKIPVRAYSNASSVELFLNGKSLGLKTFNKKQTSDGRTYQEGANANELYLEWKVAYQPGTLEAIARDESGKEIARDKITTAGKPAAVRLIKEDHAIAADGKDLTYIYYEIVDSQGNVVPTANNLVRFQLHGQGQLVGVDNGEQASRERYKAQADGSWIRKAFNGKGVAIVKSTEQAGKFTLTAHSDLLKSNQVTVFTGKKEGQEKTVLGTEVPKVQTIIGEAPEMPTTVPFVYSDGSRAERPVTWSSVDVSKPGIVTVKGMADGREVEARVEVIALKSELPVVKRIAPNTDLNSVDKSVSYVLIDGSVEEYEVDKWEIAEEDKAKAAALEHHHHHH

SEQ ID NO: 210 - protein, 1287 aa, Artificial Sequence
  Description of Artificial Sequence: Synthetic hybrid polypeptide
MVSAQESSTYTVKEGDTLSEIAETHNTTVEKLAENNHIDNIHLIYVDQELVIDGPVAPVATPAPATYAAPAAQDETVSAPVAETPVVSETVVSTVSGSEAEAKEWIAQKESGGSYTATNGRYIGRYQLTDSYLNGDYSAENQERVADAYVAGRYGSWTAAKNFWLNNGWYGSGSGGGGIAEEDKAKLAIPGSRIQATGYLEGQPIHATLVVEEGNPAAPAVPTVTVGGEAVTGLTSQKPMQYRTLAYGAKLPEVTASAKNAAVTVLQASAANGMRASIFIQPKDGGPLQTYAIQFLEEAPKIAHLSLQVEKADSLKEDQTVKLSVRAHYQDGTQAVLPADKVTFSTSGEGEVAIRKGMLELHKPGAVTLNAEYEGAKDQVELTIQANTEKKIAQSIRPVNVVTDLHQEPSLPATVTVEYDKGFPKTHKVTWQAIPKEKLDSYQTFEVLGKVEGIDLEARAKVSVEGIVSVEEVSVTTPIAEAPQLPESVRTYDSNGHVSSAKVAWDAIRPEQYAKEGVFTVNGRLEGTQLTTKLHVRVSAQTEQGANISDQWTGSELPLAFASDSNPSDPVSNVNDKLISYNNQPANRWTNWNRTNPEASVGVLFGDSGILSKRSVDNLSVGFHEDHGVGVPKSYVIEYYVGKTVPTAPKNPSFVGNEDHVFNDSANWKPVTNLKAPAQLKAGEMNHFSFDKVETYAVRIRMVKADNKRGTSITEVQIFAKQVAAAKQGQTRIQVDGKDLANFNPDLTDYYLESVDGKVPAVTASVSNNGLATVVPSVREGEPVRVIAKAENGDILGEYRLHFTKDKSLLSHKPVAAVKQARLLQVGQALELPTKVPVYFTGKDGYETKDLTVEWEEVPAENLTKAGQFTVRGRVLGSNLVAEITVRVTDKLGETLSDNPNYDENSNQAFASATNDIDKNSHDRVDYLNDGDHSENRRWTNWSPTPSSNPEVSAGVIFRENGKIVERTVTQGKVQFFADSGTDAPSKLVLERYVGPEFEVPTYYSNYQAYDADHPFNNPENWEAVPYRADKDIAAGDEINVTFKAIKAKAMRWRMERKADKSGVAMIEMTFLAPSELPQESTQSKILVDGKELADFAENRQDYQITYKGQRPKVSVEENNQVASTVVDSGEDSFPVLVRLVSESGKQVKEYRIHLTKEKPVSEKTVAAVQEDLPKIEFVEKDLAYKTVEKKDSTLYLGETRVEQEGKVGKERIFTAINPDGSKEEKLREVVEVPTDRIVLVGTKPVAQEAKKPQVSEKADTKPIDSSEASQTNKAQAAALEHHHHHH

SEQ ID NO: 211 - protein, 1212 aa, Artificial Sequence
  Description of Artificial Sequence: Synthetic hybrid polypeptide
MASETPETSPAIGKVVIKETGEGGALLGDAVFELKNNTDGTTVSQRTEAQTGEAIFSNIKPGTYTLTEAQPPVGYKPSTKQWTVEVEKNGRTTVQGEQVENREEALSDQYPQTGTYPDVQTPYQIIKVDGSEKNGQHKALNPNPYERVIPEGTLSKRIYQVNNLDDNQYGIELTVSGKTVYEQKDKSVPLDVVILLDNSNSMSNIRNKNARRAERAGEATRSLIDKITSDSENRVALVTYASTIFDGTEFTVEKGVADKNGKRLNDSLFWNYDQTSFTTNTKDYSYLKLTNDKNDIVELKNKVPTEAEDHDGNRLMYQFGATFTQKALMKADEILTQQARQNSQKVIFHITDGVPTMSYPINFNHATFAPSYQNQLNAFFSKSPNKDGILLSDFITQATSGEHTIVRGDGQSYQMFTDKTVYEKGAPAAFPVKPEKYSEMKAAGYAVIGDPINGGYIWLNWRESILAYPFNSNTAKITNHGDPTRWYYNGNIAPDGYDVFTVGIGINGDPGTDEATATSFMQSISSKPENYTNVTDTTKILEQLNRYFHTIVTEKKSIENGTITDPMGELIDLQLGTDGRFDPADYTLTANDGSRLENGQAVGGPQNDGGLLKNAKVLYDTTEKRIRVTGLYLGTDEKVTLTYNVRLNDEFVSNKFYDTNGRTTLHPKEVEQNTVRDFPIPKIRDVRKYPEITISKEKKLGDIEFIKVNKNDKKPLRGAVFSLQKQHPDYPDIYGAIDQNGTYQNVRTGEDGKLTFKNLSDGKYRLFENSEPAGYKPVQNKPIVAFQIVNGEVRDVTSIVPQDIPAGYEFTNDKHYITNEPIPPKREGSGSGGGGAETTDDKIAAQDNKISNLTAQQQEAQKQVDQIQEQVSAIQAEQSNLQAENDRLQAESKKLEGEITELSKNIVSRNQSLEKQARSAQTNGAVTSYINTIVNSKSITEAISRVAAMSEIVSANNKMLEQQKADKKAISEKQVANNDAINTVIANQQKLADDAQALTTKQAELKAAELSLAAEKATAEGEKASLLEQKAAAEAEARAAAVAEAAYKEKRASQQQSVLASANTNLTAQVQAVSESAAAPVRAKVRPTYSTNASSYPIGECTWGVKTLAPWAGDYWGNGAQWATSAAAAGFRTGSTPQVGAIACWNDGGYGHVAVVTAVESTTRIQVSESNYAGNRTIGNHRGWFNPTTTSEGFVTYIYADAAALEHHHHHH

SEQ ID NO: 212 - protein, 2999 aa, Artificial Sequence
  Description of Artificial Sequence: Synthetic hybrid polypeptide
MASETPETSPAIGKVVIKETGEGGALLGDAVFELKNNTDGTTVSQRTEAQTGEAIFSNIKPGTYTLTEAQPPVGYKPSTKQWTVEVEKNGRTTVQGEQVENREEALSDQYPQTGTYPDVQTPYQIIKVDGSEKNGQHKALNPNPYERVIPEGTLSKRIYQVNNLDDNQYGIELTVSGKTVYEQKDKSVPLDVVILLDNSNSMSNIRNKNARRAERAGEATRSLIDKITSDSENRVALVTYASTIFDGTEFTVEKGVADKNGKRLNDSLFWNYDQTSFTTNTKDYSYLKLTNDKNDIVELKNKVPTEAEDHDGNRLMYQFGATFTQKALMKADEILTQQARQNSQKVIFHITDGVPTMSYPINFNHATFAPSYQNQLNAFFSKSPNKDGILLSDFITQATSGEHTIVRGDGQSYQMFTDKTVYEKGAPAAFPVKPEKYSEMKAAGYAVIGDPINGGYIWLNWRESILAYPFNSNTAKITNHGDPTRWYYNGNIAPDGYDVFTVGIGINGDPGTDEATATSFMQSISSKPENYTNVTDTTKILEQLNRYFHTIVTEKKSIENGTITDPMGELIDLQLGTDGRFDPADYTLTANDGSRLENGQAVGGPQNDGGLLKNAKVLYDTTEKRIRVTGLYLGTDEKVTLTYNVRLNDEFVSNKFYDTNGRTTLHPKEVEQNTVRDFPIPKIRDVRKYPEITISKEKKLGDIEFIKVNKNDKKPLRGAVFSLQKQHPDYPDIYGAIDQNGTYQNVRTGEDGKLTFKNLSDGKYRLFENSEPAGYKPVQNKPIVAFQIVNGEVRDVTSIVPQDIPAGYEFTNDKHYITNEPIPPKREGSGSGGGGDETLITHTAEKPKEEKMIVEEKADKALETKNIVERTEQSEPSSTEAIASEKKEDEAVTPKEEKVSAKPEEKAPRIESQASNQEKPLKEDAKAVTNEEVNQMIEDRKVDFNQNWYFKLNANSKEAIKPDADVSTWKKLDLPYDWSIFNDFDHESPAQNEGGQLNGGEAWYRKTFKLDEKDLKKNVRLTFDGVYMDSQVYVNGQLVGHYPNGYNQFSYDITKYLQKDGRENVIAVHAVNKQPSSRWYSGSGIYRDVTLQVTDKVHVEKNGTTILTPKLEEQQHGKVETHVTSKIVNTDDKDHELVAEYQIVERGGHAVTGLVRTASRTLKAHESTSLDAILEVERPKLWTVLNDKPALYELITRVYRDGQLVDAKKDLFGYRYYHWTPNEGFSLNGERIKFHGVSLHHDHGALGAEENYKAEYRRLKQMKEMGVNSIRTTHNPASEQTLQIAAELGLLVQEEAFDTWYGGKKPYDYGRFFEKDATHPEARKGEKWSDFDLRTMVERGKNNPAIFMWSIGNEIGEANGDAHSLATVKRLVKVIKDVDKTRYVTMGADKFRFGNGSGGHEKIADELDAVGFNYSEDNYKALRAKHPKWLIYGSETSSATRTRGSYYRPERELKHSNGPERNYEQSDYGNDRVGWGKTATASWTFDRDNAGYAGQFIWTGTDYIGEPTPWHNQNQTPVKSSYFGIVDTAGIPKHDFYLYQSQWVSVKKKPMVHLLPHWNWENKELASKVADSEGKIPVRAYSNASSVELFLNGKSLGLKTFNKKQTSDGRTYQEGANANELYLEWKVAYQPGTLEAIARDESGKEIARDKITTAGKPAAVRLIKEDHAIAADGKDLTYIYYEIVDSQGNVVPTANNLVRFQLHGQGQLVGVDNGEQASRERYKAQADGSWIRKAFNGKGVAIVKSTEQAGKFTLTAHSDLLKSNQVTVFTGKKEGQEKTVLGTEVPKVQTIIGEAPEMPTTVPFVYSDGSRAERPVTWSSVDVSKPGIVTVKGMADGREVEARVEVIALKSELPVVKRIAPNTDLNSVDKSVSYVLIDGSVEEYEVDKWEIAEEDKAKLAIPGSRIQATGYLEGQPIHATLVVEEGNPAAPAVPTVTVGGEAVTGLTSQKPMQYRTLAYGAKLPEVTASAKNAAVTVLQASAANGMRASIFIQPKDGGPLQTYAIQFLEEAPKIAHLSLQVEKADSLKEDQTVKLSVRAHYQDGTQAVLPADKVTFSTSGEGEVAIRKGMLELHKPGAVTLNAEYEGAKDQVELTIQANTEKKIAQSIRPVNVVTDLHQEPSLPATVTVEYDKGFPKTHKVTWQAIPKEKLDSYQTFEVLGKVEGIDLEARAKVSVEGIVSVEEVSVTTPIAEAPQLPESVRTYDSNGHVSSAKVAWDAIRPEQYAKEGVFTVNGRLEGTQLTTKLHVRVSAQTEQGANISDQWTGSELPLAFASDSNPSDPVSNVNDKLISYNNQPANRWTNWNRTNPEASVGVLFGDSGILSKRSVDNLSVGFHEDHGVGVPKSYVIEYYVGKTVPTAPKNPSFVGNEDHVFNDSANWKPVTNLKAPAQLKAGEMNHFSFDKVETYAVRIRMVKADNKRGTSITEVQIFAKQVAAAKQGQTRIQVDGKDLANFNPDLTDYYLESVDGKVPAVTASVSNNGLATVVPSVREGEPVRVIAKAENGDILGEYRLHFTKDKSLLSHKPVAAVKQARLLQVGQALELPTKVPVYFTGKDGYETKDLTVEWEEVPAENLTKAGQFTVRGRVLGSNLVAEITVRVTDKLGETLSDNPNYDENSNQAFASATNDIDKNSHDRVDYLNDGDHSENRRWTNWSPTPSSNPEVSAGVIFRENGKIVERTVTQGKVQFFADSGTDAPSKLVLERYVGPEFEVPTYYSNYQAYDADHPFNNPENWEAVPYRADKDIAAGDEINVTFKAIKAKAMRWRMERKADKSGVAMIEMTFLAPSELPQESTQSKILVDGKELADFAENRQDYQITYKGQRPKVSVEENNQVASTVVDSGEDSFPVLVRLVSESGKQVKEYRIHLTKEKPVSEKTVAAVQEDLPKIEFVEKDLAYKTVEKKDSTLYLGETRVEQEGKVGKERIFTAINPDGSKEEKLREVVEVPTDRIVLVGTKPVAQEAKKPQVSEKADTKPIDSSEASQTNKAQAAALEHHHHHH

SEQ ID NO: 213 - protein, 1909 aa, Artificial Sequence
  Description of Artificial Sequence: Synthetic hybrid polypeptide
MASETPETSPAIGKVVIKETGEGGALLGDAVFELKNNTDGTTVSQRTEAQTGEAIFSNIKPGTYTLTEAQPPVGYKPSTKQWTVEVEKNGRTTVQGEQVENREEALSDQYPQTGTYPDVQTPYQIIKVDGSEKNGQHKALNPNPYERVIPEGTLSKRIYQVNNLDDNQYGIELTVSGKTVYEQKDKSVPLDVVILLDNSNSMSNIRNKNARRAERAGEATRSLIDKITSDSENRVALVTYASTIFDGTEFTVEKGVADKNGKRLNDSLFWNYDQTSFTTNTKDYSYLKLTNDKNDIVELKNKVPTEAEDHDGNRLMYQFGATFTQKALMKADEILTQQARQNSQKVIFHITDGVPTMSYPINFNHATFAPSYQNQLNAFFSKSPNKDGILLSDFITQATSGEHTIVRGDGQSYQMFTDKTVYEKGAPAAFPVKPEKYSEMKAAGYAVIGDPINGGYIWLNWRESILAYPFNSNTAKITNHGDPTRWYYNGNIAPDGYDVFTVGIGINGDPGTDEATATSFMQSISSKPENYTNVTDTTKILEQLNRYFHTIVTEKKSIENGTITDPMGELIDLQLGTDGRFDPADYTLTANDGSRLENGQAVGGPQNDGGLLKNAKVLYDTTEKRIRVTGLYLGTDEKVTLTYNVRLNDEFVSNKFYDTNGRTTLHPKEVEQNTVRDFPIPKIRDVRKYPEITISKEKKLGDIEFIKVNKNDKKPLRGAVFSLQKQHPDYPDIYGAIDQNGTYQNVRTGEDGKLTFKNLSDGKYRLFENSEPAGYKPVQNKPIVAFQIVNGEVRDVTSIVPQDIPAGYEFTNDKHYITNEPIPPKREGSGSGGGGDETLITHTAEKPKEEKMIVEEKADKALETKNIVERTEQSEPSSTEAIASEKKEDEAVTPKEEKVSAKPEEKAPRIESQASNQEKPLKEDAKAVTNEEVNQMIEDRKVDFNQNWYFKLNANSKEAIKPDADVSTWKKLDLPYDWSIFNDFDHESPAQNEGGQLNGGEAWYRKTFKLDEKDLKKNVRLTFDGVYMDSQVYVNGQLVGHYPNGYNQFSYDITKYLQKDGRENVIAVHAVNKQPSSRWYSGSGIYRDVTLQVTDKVHVEKNGTTILTPKLEEQQHGKVETHVTSKIVNTDDKDHELVAEYQIVERGGHAVTGLVRTASRTLKAHESTSLDAILEVERPKLWTVLNDKPALYELITRVYRDGQLVDAKKDLFGYRYYHWTPNEGFSLNGERIKFHGVSLHHDHGALGAEENYKAEYRRLKQMKEMGVNSIRTTHNPASEQTLQIAAELGLLVQEEAFDTWYGGKKPYDYGRFFEKDATHPEARKGEKWSDFDLRTMVERGKNNPAIFMWSIGNEIGEANGDAHSLATVKRLVKVIKDVDKTRYVTMGADKFRFGNGSGGHEKIADELDAVGFNYSEDNYKALRAKHPKWLIYGSETSSATRTRGSYYRPERELKHSNGPERNYEQSDYGNDRVGWGKTATASWTFDRDNAGYAGQFIWTGTDYIGEPTPWHNQNQTPVKSSYFGIVDTAGIPKHDFYLYQSQWVSVKKKPMVHLLPHWNWENKELASKVADSEGKIPVRAYSNASSVELFLNGKSLGLKTFNKKQTSDGRTYQEGANANELYLEWKVAYQPGTLEAIARDESGKEIARDKITTAGKPAAVRLIKEDHAIAADGKDLTYIYYEIVDSQGNVVPTANNLVRFQLHGQGQLVGVDNGEQASRERYKAQADGSWIRKAFNGKGVAIVKSTEQAGKFTLTAHSDLLKSNQVTVFTGKKEGQEKTVLGTEVPKVQTIIGEAPEMPTTVPFVYSDGSRAERPVTWSSVDVSKPGIVTVKGMADGREVEARVEVIALKSELPVVKRIAPNTDLNSVDKSVSYVLIDGSVEEYEVDKWEIAEEDKAKAAALEHHHHHH

SEQ ID NO: 214 - protein, 1944 aa, Artificial Sequence
  Description of Artificial Sequence: Synthetic hybrid polypeptide
MASETPETSPAIGKVVIKETGEGGALLGDAVFELKNNTDGTTVSQRTEAQTGEAIFSNIKPGTYTLTEAQPPVGYKPSTKQWTVEVEKNGRTTVQGEQVENREEALSDQYPQTGTYPDVQTPYQIIKVDGSEKNGQHKALNPNPYERVIPEGTLSKRIYQVNNLDDNQYGIELTVSGKTVYEQKDKSVPLDVVILLDNSNSMSNIRNKNARRAERAGEATRSLIDKITSDSENRVALVTYASTIFDGTEFTVEKGVADKNGKRLNDSLFWNYDQTSFTTNTKDYSYLKLTNDKNDIVELKNKVPTEAEDHDGNRLMYQFGATFTQKALMKADEILTQQARQNSQKVIFHITDGVPTMSYPINFNHATFAPSYQNQLNAFFSKSPNKDGILLSDFITQATSGEHTIVRGDGQSYQMFTDKTVYEKGAPAAFPVKPEKYSEMKAAGYAVIGDPINGGYIWLNWRESILAYPFNSNTAKITNHGDPTRWYYNGNIAPDGYDVFTVGIGINGDPGTDEATATSFMQSISSKPENYTNVTDTTKILEQLNRYFHTIVTEKKSIENGTITDPMGELIDLQLGTDGRFDPADYTLTANDGSRLENGQAVGGPQNDGGLLKNAKVLYDTTEKRIRVTGLYLGTDEKVTLTYNVRLNDEFVSNKFYDTNGRTTLHPKEVEQNTVRDFPIPKIRDVRKYPEITISKEKKLGDIEFIKVNKNDKKPLRGAVFSLQKQHPDYPDIYGAIDQNGTYQNVRTGEDGKLTFKNLSDGKYRLFENSEPAGYKPVQNKPIVAFQIVNGEVRDVTSIVPQDIPAGYEFTNDKHYITNEPIPPKREGSGSGGGGIAEEDKAKLAIPGSRIQATGYLEGQPIHATLVVEEGNPAAPAVPTVTVGGEAVTGLTSQKPMQYRTLAYGAKLPEVTASAKNAAVTVLQASAANGMRASIFIQPKDGGPLQTYAIQFLEEAPKIAHLSLQVEKADSLKEDQTVKLSVRAHYQDGTQAVLPADKVTFSTSGEGEVAIRKGMLELHKPGAVTLNAEYEGAKDQVELTIQANTEKKIAQSIRPVNVVTDLHQEPSLPATVTVEYDKGFPKTHKVTWQAIPKEKLDSYQTFEVLGKVEGIDLEARAKVSVEGIVSVEEVSVTTPIAEAPQLPESVRTYDSNGHVSSAKVAWDAIRPEQYAKEGVFTVNGRLEGTQLTTKLHVRVSAQTEQGANISDQWTGSELPLAFASDSNPSDPVSNVNDKLISYNNQPANRWTNWNRTNPEASVGVLFGDSGILSKRSVDNLSVGFHEDHGVGVPKSYVIEYYVGKTVPTAPKNPSFVGNEDHVFNDSANWKPVTNLKAPAQLKAGEMNHFSFDKVETYAVRIRMVKADNKRGTSITEVQIFAKQVAAAKQGQTRIQVDGKDLANFNPDLTDYYLESVDGKVPAVTASVSNNGLATVVPSVREGEPVRVIAKAENGDILGEYRLHFTKDKSLLSHKPVAAVKQARLLQVGQALELPTKVPVYFTGKDGYETKDLTVEWEEVPAENLTKAGQFTVRGRVLGSNLVAEITVRVTDKLGETLSDNPNYDENSNQAFASATNDIDKNSHDRVDYLNDGDHSENRRWTNWSPTPSSNPEVSAGVIFRENGKIVERTVTQGKVQFFADSGTDAPSKLVLERYVGPEFEVPTYYSNYQAYDADHPFNNPENWEAVPYRADKDIAAGDEINVTFKAIKAKAMRWRMERKADKSGVAMIEMTFLAPSELPQESTQSKILVDGKELADFAENRQDYQITYKGQRPKVSVEENNQVASTVVDSGEDSFPVLVRLVSESGKQVKEYRIHLTKEKPVSEKTVAAVQEDLPKIEFVEKDLAYKTVEKKDSTLYLGETRVEQEGKVGKERIFTAINPDGSKEEKLREVVEVPTDRIVLVGTKPVAQEAKKPQVSEKADTKPIDSSEASQTNKAQAAALEHHHHHH

SEQ ID NO: 215 - protein, 2090 aa, Artificial Sequence
  Description of Artificial Sequence: Synthetic hybrid polypeptide
MASETPETSPAIGKVVIKETGEGGALLGDAVFELKNNTDGTTVSQRTEAQTGEAIFSNIKPGTYTLTEAQPPVGYKPSTKQWTVEVEKNGRTTVQGEQVENREEALSDQYPQTGTYPDVQTPYQIIKVDGSEKNGQHKALNPNPYERVIPEGTLSKRIYQVNNLDDNQYGIELTVSGKTVYEQKDKSVPLDVVILLDNSNSMSNIRNKNARRAERAGEATRSLIDKITSDSENRVALVTYASTIFDGTEFTVEKGVADKNGKRLNDSLFWNYDQTSFTTNTKDYSYLKLTNDKNDIVELKNKVPTEAEDHDGNRLMYQFGATFTQKALMKADEILTQQARQNSQKVIFHITDGVPTMSYPINFNHATFAPSYQNQLNAFFSKSPNKDGILLSDFITQATSGEHTIVRGDGQSYQMFTDKTVYEKGAPAAFPVKPEKYSEMKAAGYAVIGDPINGGYIWLNWRESILAYPFNSNTAKITNHGDPTRWYYNGNIAPDGYDVFTVGIGINGDPGTDEATATSFMQSISSKPENYTNVTDTTKILEQLNRYFHTIVTEKKSIENGTITDPMGELIDLQLGTDGRFDPADYTLTANDGSRLENGQAVGGPQNDGGLLKNAKVLYDTTEKRIRVTGLYLGTDEKVTLTYNVRLNDEFVSNKFYDTNGRTTLHPKEVEQNTVRDFPIPKIRDVRKYPEITISKEKKLGDIEFIKVNKNDKKPLRGAVFSLQKQHPDYPDIYGAIDQNGTYQNVRTGEDGKLTFKNLSDGKYRLFENSEPAGYKPVQNKPIVAFQIVNGEVRDVTSIVPQDIPAGYEFTNDKHYITNEPIPPKREGSGSGGGGADGVTPTTTENQPTIHTVSDSPQSSENRTEETPKAVLQPEAPKTVETETPATDKVASLPKTEEKPQEEVSSTPSDKAEVVTPTSAEKETANKKAEEASPKKEEAKEVDSKESNTDKTDKDKPAKKDEAKAEADKPATEAGKERAATVNEKLAKKKIVSIDAGRKYFSPEQLKEIIDKAKHYGYTDLHLLVGNDGLRFMLDDMSITANGKTYASDDVKRAIEKGTNDYYNDPNGNHLTESQMTDLINYAKDKGIGLIPTVNSPGHMDAILNAMKELGIQNPNFSYFGKKSARTVDLDNEQAVAFTKALIDKYAAYFAKKTEIFNIGLDEYANDATDAKGWSVLQADKYYPNEGYPVKGYEKFIAYANDLARIVKSHGLKPMAFNDGIYYNSDTSFGSFDKDIIVSMWTGGWGGYDVASSKLLAEKGHQILNTNDAWYYVLGRNADGQGWYNLDQGLNGIKNTPITSVPKTEGADIPIIGGMVAAWADTPSARYSPSRLFKLMRHFANANAEYFAADYESAEQALNEVPKDLNRYTAESVTAVKEAEKAIRSLDSNLSRAQQDTIDQAIAKLQETVNNLTLTPEAQKEEEAKREVEKLAKNKVISIDAGRKYFTLNQLKRIVDKASELGYSDVHLLLGNDGLRFLLDDMTITANGKTYASDDVKKAIIEGTKAYYDDPNGTALTQAEVTELIEYAKSKDIGLIPAINSPGHMDAMLVAMEKLGIKNPQAHFDKVSKTTMDLKNEEAMNFVKALIGKYMDFFAGKTKIFNFGTDEYANDATSAQGWYYLKWYQLYGKFAEYANTLAAMAKERGLQPMAFNDGFYYEDKDDVQFDKDVLISYWSKGWWGYNLASPQYLASKGYKFLNTNGDWYYILGQKPEDGGGFLKKAIENTGKTPFNQLASTKYPEVDLPTVGSMLSIWADRPSAEYKEEEIFELMTAFADHNKDYFRANYNALREELAKIPTNLEGYSKESLEALDAAKTALNYNLNRNKQAELDTLVANLKAALQGLKPAVTHSGSLDENEVAANVETRPELITRTEEIPFEVIKKENPNLPAGQENIITAGVKGERTHYISVLTENGKTTETVLDSQVTKEVINQVVEVGAPVTHKGDESGLAPTTEVKPRLDIQEEEIPFTTVTCENPLLLKGKTQVITKGVNGHRSNFYSVSTSADGKEVKTLVNSVVAQEAVTQIVEVGTMVTHVGDENGQAAIAEEKPKLEIPSQPAPSTAPAEESKVLPQDPAPVVTEKKLEHHHHHH

SEQ ID NO: 216 - protein, 1012 aa, Artificial Sequence
  Description of Artificial Sequence: Synthetic hybrid polypeptide
MASETPETSPAIGKVVIKETGEGGALLGDAVFELKNNTDGTTVSQRTEAQTGEAIFSNIKPGTYTLTEAQPPVGYKPSTKQWTVEVEKNGRTTVQGEQVENREEALSDQYPQTGTYPDVQTPYQIIKVDGSEKNGQHKALNPNPYERVIPEGTLSKRIYQVNNLDDNQYGIELTVSGKTVYEQKDKSVPLDVVILLDNSNSMSNIRNKNARRAERAGEATRSLIDKITSDSENRVALVTYASTIFDGTEFTVEKGVADKNGKRLNDSLFWNYDQTSFTTNTKDYSYLKLTNDKNDIVELKNKVPTEAEDHDGNRLMYQFGATFTQKALMKADEILTQQARQNSQKVIFHITDGVPTMSYPINFNHATFAPSYQNQLNAFFSKSPNKDGILLSDFITQATSGEHTIVRGDGQSYQMFTDKTVYEKGAPAAFPVKPEKYSEMKAAGYAVIGDPINGGYIWLNWRESILAYPFNSNTAKITNHGDPTRWYYNGNIAPDGYDVFTVGIGINGDPGTDEATATSFMQSISSKPENYTNVTDTTKILEQLNRYFHTIVTEKKSIENGTITDPMGELIDLQLGTDGRFDPADYTLTANDGSRLENGQAVGGPQNDGGLLKNAKVLYDTTEKRIRVTGLYLGTDEKVTLTYNVRLNDEFVSNKFYDTNGRTTLHPKEVEQNTVRDFPIPKIRDVRKYPEITISKEKKLGDIEFIKVNKNDKKPLRGAVFSLQKQHPDYPDIYGAIDQNGTYQNVRTGEDGKLTFKNLSDGKYRLFENSEPAGYKPVQNKPIVAFQIVNGEVRDVTSIVPQDIPAGYEFTNDKHYITNEPIPPKREGSGSGGGGVSAQESSTYTVKEGDTLSEIAETHNTTVEKLAENNHIDNIHLIYVDQELVIDGPVAPVATPAPATYAAPAAQDETVSAPVAETPVVSETVVSTVSGSEAEAKEWIAQKESGGSYTATNGRYIGRYQLTDSYLNGDYSAENQERVADAYVAGRYGSWTAAKNFWLNNGWYLEHHHHHH

SEQ ID NO: 217 - protein, 3422 aa, Artificial Sequence
  Description of Artificial Sequence: Synthetic hybrid polypeptide
MASDETLITHTAEKPKEEKMIVEEKADKALETKNIVERTEQSEPSSTEAIASEKKEDEAVTPKEEKVSAKPEEKAPRIESQASNQEKPLKEDAKAVTNEEVNQMIEDRKVDFNQNWYFKLNANSKEAIKPDADVSTWKKLDLPYDWSIFNDFDHESPAQNEGGQLNGGEAWYRKTFKLDEKDLKKNVRLTFDGVYMDSQVYVNGQLVGHYPNGYNQFSYDITKYLQKDGRENVIAVHAVNKQPSSRWYSGSGIYRDVTLQVTDKVHVEKNGTTILTPKLEEQQHGKVETHVTSKIVNTDDKDHELVAEYQIVERGGHAVTGLVRTASRTLKAHESTSLDAILEVERPKLWTVLNDKPALYELITRVYRDGQLVDAKKDLFGYRYYHWTPNEGFSLNGERIKFHGVSLHHDHGALGAEENYKAEYRRLKQMKEMGVNSIRTTHNPASEQTLQIAAELGLLVQEEAFDTWYGGKKPYDYGRFFEKDATHPEARKGEKWSDFDLRTMVERGKNNPAIFMWSIGNEIGEANGDAHSLATVKRLVKVIKDVDKTRYVTMGADKFRFGNGSGGHEKIADELDAVGFNYSEDNYKALRAKHPKWLIYGSETSSATRTRGSYYRPERELKHSNGPERNYEQSDYGNDRVGWGKTATASWTFDRDNAGYAGQFIWTGTDYIGEPTPWHNQNQTPVKSSYFGIVDTAGIPKHDFYLYQSQWVSVKKKPMVHLLPHWNWENKELASKVADSEGKIPVRAYSNASSVELFLNGKSLGLKTFNKKQTSDGRTYQEGANANELYLEWKVAYQPGTLEAIARDESGKEIARDKITTAGKPAAVRLIKEDHAIAADGKDLTYIYYEIVDSQGNVVPTANNLVRFQLHGQGQLVGVDNGEQASRERYKAQADGSWIRKAFNGKGVAIVKSTEQAGKFTLTAHSDLLKSNQVTVFTGKKEGQEKTVLGTEVPKVQTIIGEAPEMPTTVPFVYSDGSRAERPVTWSSVDVSKPGIVTVKGMADGREVEARVEVIALKSELPVVKRIAPNTDLNSVDKSVSYVLIDGSVEEYEVDKWEIAEEDKAKLAIPGSRIQATGYLEGQPIHATLVVEEGNPAAPAVPTVTVGGEAVTGLTSQKPMQYRTLAYGAKLPEVTASAKNAAVTVLQASAANGMRASIFIQPKDGGPLQTYAIQFLEEAPKIAHLSLQVEKADSLKEDQTVKLSVRAHYQDGTQAVLPADKVTFSTSGEGEVAIRKGMLELHKPGAVTLNAEYEGAKDQVELTIQANTEKKIAQSIRPVNVVTDLHQEPSLPATVTVEYDKGFPKTHKVTWQAIPKEKLDSYQTFEVLGKVEGIDLEARAKVSVEGIVSVEEVSVTTPIAEAPQLPESVRTYDSNGHVSSAKVAWDAIRPEQYAKEGVFTVNGRLEGTQLTTKLHVRVSAQTEQGANISDQWTGSELPLAFASDSNPSDPVSNVNDKLISYNNQPANRWTNWNRTNPEASVGVLFGDSGILSKRSVDNLSVGFHEDHGVGVPKSYVIEYYVGKTVPTAPKNPSFVGNEDHVFNDSANWKPVTNLKAPAQLKAGEMNHFSFDKVETYAVRIRMVKADNKRGTSITEVQIFAKQVAAAKQGQTRIQVDGKDLANFNPDLTDYYLESVDGKVPAVTASVSNNGLATVVPSVREGEPVRVIAKAENGDILGEYRLHFTKDKSLLSHKPVAAVKQARLLQVGQALELPTKVPVYFTGKDGYETKDLTVEWEEVPAENLTKAGQFTVRGRVLGSNLVAEITVRVTDKLGETLSDNPNYDENSNQAFASATNDIDKNSHDRVDYLNDGDHSENRRWTNWSPTPSSNPEVSAGVIFRENGKIVERTVTQGKVQFFADSGTDAPSKLVLERYVGPEFEVPTYYSNYQAYDADHPFNNPENWEAVPYRADKDIAAGDEINVTFKAIKAKAMRWRMERKADKSGVAMIEMTFLAPSELPQESTQSKILVDGKELADFAENRQDYQITYKGQRPKVSVEENNQVASTVVDSGEDSFPVLVRLVSESGKQVKEYRIHLTKEKPVSEKTVAAVQEDLPKIEFVEKDLAYKTVEKKDSTLYLGETRVEQEGKVGKERIFTAINPDGSKEEKLREVVEVPTDRIVLVGTKPVAQEAKKPQVSEKADTKPIDSSEASQTNKAQGSGSGGGGADGVTPTTTENQPTIHTVSDSPQSSENRTEETPKAVLQPEAPKTVETETPATDKVASLPKTEEKPQEEVSSTPSDKAEVVTPTSAEKETANKKAEEASPKKEEAKEVDSKESNTDKTDKDKPAKKDEAKAEADKPATEAGKERAATVNEKLAKKKIVSIDAGRKYFSPEQLKEIIDKAKHYGYTDLHLLVGNDGLRFMLDDMSITANGKTYASDDVKRAIEKGTNDYYNDPNGNHLTESQMTDLINYAKDKGIGLIPTVNSPGHMDAILNAMKELGIQNPNFSYFGKKSARTVDLDNEQAVAFTKALIDKYAAYFAKKTEIFNIGLDEYANDATDAKGWSVLQADKYYPNEGYPVKGYEKFIAYANDLARIVKSHGLKPMAFNDGIYYNSDTSFGSFDKDIIVSMWTGGWGGYDVASSKLLAEKGHQILNTNDAWYYVLGRNADGQGWYNLDQGLNGIKNTPITSVPKTEGADIPIIGGMVAAWADTPSARYSPSRLFKLMRHFANANAEYFAADYESAEQALNEVPKDLNRYTAESVTAVKEAEKAIRSLDSNLSRAQQDTIDQAIAKLQETVNNLTLTPEAQKEEEAKREVEKLAKNKVISIDAGRKYFTLNQLKRIVDKASELGYSDVHLLLGNDGLRFLLDDMTITANGKTYASDDVKKAIIEGTKAYYDDPNGTALTQAEVTELIEYAKSKDIGLIPAINSPGHMDAMLVAMEKLGIKNPQAHFDKVSKTTMDLKNEEAMNFVKALIGKYMDFFAGKTKIFNFGTDEYANDATSAQGWYYLKWYQLYGKFAEYANTLAAMAKERGLQPMAFNDGFYYEDKDDVQFDKDVLISYWSKGWWGYNLASPQYLASKGYKFLNTNGDWYYILGQKPEDGGGFLKKAIENTGKTPFNQLASTKYPEVDLPTVGSMLSIWADRPSAEYKEEEIFELMTAFADHNKDYFRANYNALREELAKIPTNLEGYSKESLEALDAAKTALNYNLNRNKQAELDTLVANLKAALQGLKPAVTHSGSLDENEVAANVETRPELITRTEEIPFEVIKKENPNLPAGQENIITAGVKGERTHYISVLTENGKTTETVLDSQVTKEVINQVVEVGAPVTHKGDESGLAPTTEVKPRLDIQEEEIPFTTVTCENPLLLKGKTQVITKGVNGHRSNFYSVSTSADGKEVKTLVNSVVAQEAVTQIVEVGTMVTHVGDENGQAAIAEEKPKLEIPSQPAPSTAPAEESKVLPQDPAPVVTEKKAAALEHHHHHH

SEQ ID NO: 218 - protein, 2332 aa, Artificial Sequence
  Description of Artificial Sequence: Synthetic hybrid polypeptide
MASDETLITHTAEKPKEEKMIVEEKADKALETKNIVERTEQSEPSSTEAIASEKKEDEAVTPKEEKVSAKPEEKAPRIESQASNQEKPLKEDAKAVTNEEVNQMIEDRKVDFNQNWYFKLNANSKEAIKPDADVSTWKKLDLPYDWSIFNDFDHESPAQNEGGQLNGGEAWYRKTFKLDEKDLKKNVRLTFDGVYMDSQVYVNGQLVGHYPNGYNQFSYDITKYLQKDGRENVIAVHAVNKQPSSRWYSGSGIYRDVTLQVTDKVHVEKNGTTILTPKLEEQQHGKVETHVTSKIVNTDDKDHELVAEYQIVERGGHAVTGLVRTASRTLKAHESTSLDAILEVERPKLWTVLNDKPALYELITRVYRDGQLVDAKKDLFGYRYYHWTPNEGFSLNGERIKFHGVSLHHDHGALGAEENYKAEYRRLKQMKEMGVNSIRTTHNPASEQTLQIAAELGLLVQEEAFDTWYGGKKPYDYGRFFEKDATHPEARKGEKWSDFDLRTMVERGKNNPAIFMWSIGNEIGEANGDAHSLATVKRLVKVIKDVDKTRYVTMGADKFRFGNGSGGHEKIADELDAVGFNYSEDNYKALRAKHPKWLIYGSETSSATRTRGSYYRPERELKHSNGPERNYEQSDYGNDRVGWGKTATASWTFDRDNAGYAGQFIWTGTDYIGEPTPWHNQNQTPVKSSYFGIVDTAGIPKHDFYLYQSQWVSVKKKPMVHLLPHWNWENKELASKVADSEGKIPVRAYSNASSVELFLNGKSLGLKTFNKKQTSDGRTYQEGANANELYLEWKVAYQPGTLEAIARDESGKEIARDKITTAGKPAAVRLIKEDHAIAADGKDLTYIYYEIVDSQGNVVPTANNLVRFQLHGQGQLVGVDNGEQASRERYKAQADGSWIRKAFNGKGVAIVKSTEQAGKFTLTAHSDLLKSNQVTVFTGKKEGQEKTVLGTEVPKVQTIIGEAPEMPTTVPFVYSDGSRAERPVTWSSVDVSKPGIVTVKGMADGREVEARVEVIALKSELPVVKRIAPNTDLNSVDKSVSYVLIDGSVEEYEVDKWEIAEEDKAKGSGSGGGGADGVTPTTTENQPTIHTVSDSPQSSENRTEETPKAVLQPEAPKTVETETPATDKVASLPKTEEKPQEEVSSTPSDKAEVVTPTSAEKETANKKAEEASPKKEEAKEVDSKESNTDKTDKDKPAKKDEAKAEADKPATEAGKERAATVNEKLAKKKIVSIDAGRKYFSPEQLKEIIDKAKHYGYTDLHLLVGNDGLRFMLDDMSITANGKTYASDDVKRAIEKGTNDYYNDPNGNHLTESQMTDLINYAKDKGIGLIPTVNSPGHMDAILNAMKELGIQNPNFSYFGKKSARTVDLDNEQAVAFTKALIDKYAAYFAKKTEIFNIGLDEYANDATDAKGWSVLQADKYYPNEGYPVKGYEKFIAYANDLARIVKSHGLKPMAFNDGIYYNSDTSFGSFDKDIIVSMWTGGWGGYDVASSKLLAEKGHQILNTNDAWYYVLGRNADGQGWYNLDQGLNGIKNTPITSVPKTEGADIPIIGGMVAAWADTPSARYSPSRLFKLMRHFANANAEYFAADYESAEQALNEVPKDLNRYTAESVTAVKEAEKAIRSLDSNLSRAQQDTIDQAIAKLQETVNNLTLTPEAQKEEEAKREVEKLAKNKVISIDAGRKYFTLNQLKRIVDKASELGYSDVHLLLGNDGLRFLLDDMTITANGKTYASDDVKKAIIEGTKAYYDDPNGTALTQAEVTELIEYAKSKDIGLIPAINSPGHMDAMLVAMEKLGIKNPQAHFDKVSKTTMDLKNEEAMNFVKALIGKYMDFFAGKTKIFNFGTDEYANDATSAQGWYYLKWYQLYGKFAEYANTLAAMAKERGLQPMAFNDGFYYEDKDDVQFDKDVLISYWSKGWWGYNLASPQYLASKGYKFLNTNGDWYYILGQKPEDGGGFLKKAIENTGKTPFNQLASTKYPEVDLPTVGSMLSIWADRPSAEYKEEEIFELMTAFADHNKDYFRANYNALREELAKIPTNLEGYSKESLEALDAAKTALNYNLNRNKQAELDTLVANLKAALQGLKPAVTHSGSLDENEVAANVETRPELITRTEEIPFEVIKKENPNLPAGQENIITAGVKGERTHYISVLTENGKTTETVLDSQVTKEVINQVVEVGAPVTHKGDESGLAPTTEVKPRLDIQEEEIPFTTVTCENPLLLKGKTQVITKGVNGHRSNFYSVSTSADGKEVKTLVNSVVAQEAVTQIVEVGTMVTHVGDENGQAAIAEEKPKLEIPSQPAPSTAPAEESKVLPQDPAPVVTEKKAAALEHHHHHH

SEQ ID NO: 219 - protein, 2364 aa, Artificial Sequence
  Description of Artificial Sequence: Synthetic hybrid polypeptide
MASIAEEDKAKLAIPGSRIQATGYLEGQPIHATLVVEEGNPAAPAVPTVTVGGEAVTGLTSQKPMQYRTLAYGAKLPEVTASAKNAAVTVLQASAANGMRASIFIQPKDGGPLQTYAIQFLEEAPKIAHLSLQVEKADSLKEDQTVKLSVRAHYQDGTQAVLPADKVTFSTSGEGEVAIRKGMLELHKPGAVTLNAEYEGAKDQVELTIQANTEKKIAQSIRPVNVVTDLHQEPSLPATVTVEYDKGFPKTHKVTWQAIPKEKLDSYQTFEVLGKVEGIDLEARAKVSVEGIVSVEEVSVTTPIAEAPQLPESVRTYDSNGHVSSAKVAWDAIRPEQYAKEGVFTVNGRLEGTQLTTKLHVRVSAQTEQGANISDQWTGSELPLAFASDSNPSDPVSNVNDKLISYNNQPANRWTNWNRTNPEASVGVLFGDSGILSKRSVDNLSVGFHEDHGVGVPKSYVIEYYVGKTVPTAPKNPSFVGNEDHVFNDSANWKPVTNLKAPAQLKAGEMNHFSFDKVETYAVRIRMVKADNKRGTSITEVQIFAKQVAAAKQGQTRIQVDGKDLANFNPDLTDYYLESVDGKVPAVTASVSNNGLATVVPSVREGEPVRVIAKAENGDILGEYRLHFTKDKSLLSHKPVAAVKQARLLQVGQALELPTKVPVYFTGKDGYETKDLTVEWEEVPAENLTKAGQFTVRGRVLGSNLVAEITVRVTDKLGETLSDNPNYDENSNQAFASATNDIDKNSHDRVDYLNDGDHSENRRWTNWSPTPSSNPEVSAGVIFRENGKIVERTVTQGKVQFFADSGTDAPSKLVLERYVGPEFEVPTYYSNYQAYDADHPFNNPENWEAVPYRADKDIAAGDEINVTFKAIKAKAMRWRMERKADKSGVAMIEMTFLAPSELPQESTQSKILVDGKELADFAENRQDYQITYKGQRPKVSVEENNQVASTVVDSGEDSFPVLVRLVSESGKQVKEYRIHLTKEKPVSEKTVAAVQEDLPKIEFVEKDLAYKTVEKKDSTLYLGETRVEQEGKVGKERIFTAINPDGSKEEKLREVVEVPTDRIVLVGTKPVAQEAKKPQVSEKADTKPIDSSEASQTNKAQGSGSGGGGADGVTPTTTENQPTIHTVSDSPQSSENRTEETPKAVLQPEAPKTVETETPATDKVASLPKTEEKPQEEVSSTPSDKAEVVTPTSAEKETANKKAEEASPKKEEAKEVDSKESNTDKTDKDKPAKKDEAKAEADKPATEAGKERAATVNEKLAKKKIVSIDAGRKYFSPEQLKEIIDKAKHYGYTDLHLLVGNDGLRFMLDDMSITANGKTYASDDVKRAIEKGTNDYYNDPNGNHLTESQMTDLINYAKDKGIGLIPTVNSPGHMDAILNAMKELGIQNPNFSYFGKKSARTVDLDNEQAVAFTKALIDKYAAYFAKKTEIFNIGLDEYANDATDAKGWSVLQADKYYPNEGYPVKGYEKFIAYANDLARIVKSHGLKPMAFNDGIYYNSDTSFGSFDKDIIVSMWTGGWGGYDVASSKLLAEKGHQILNTNDAWYYVLGRNADGQGWYNLDQGLNGIKNTPITSVPKTEGADIPIIGGMVAAWADTPSARYSPSRLFKLMRHFANANAEYFAADYESAEQALNEVPKDLNRYTAESVTAVKEAEKAIRSLDSNLSRAQQDTIDQAIAKLQETVNNLTLTPEAQKEEEAKREVEKLAKNKVISIDAGRKYFTLNQLKRIVDKASELGYSDVHLLLGNDGLRFLLDDMTITANGKTYASDDVKKAIIEGTKAYYDDPNGTALTQAEVTELIEYAKSKDIGLIPAINSPGHMDAMLVAMEKLGIKNPQAHFDKVSKTTMDLKNEEAMNFVKALIGKYMDFFAGKTKIFNFGTDEYANDATSAQGWYYLKWYQLYGKFAEYANTLAAMAKERGLQPMAFNDGFYYEDKDDVQFDKDVLISYWSKGWWGYNLASPQYLASKGYKFLNTNGDWYYILGQKPEDGGGFLKKAIENTGKTPFNQLASTKYPEVDLPTVGSMLSIWADRPSAEYKEEEIFELMTAFADHNKDYFRANYNALREELAKIPTNLEGYSKESLEALDAAKTALNYNLNRNKQAELDTLVANLKAALQGLKPAVTHSGSLDENEVAANVETRPELITRTEEIPFEVIKKENPNLPAGQENIITAGVKGERTHYISVLTENGKTTETVLDSQVTKEVINQVVEVGAPVTHKGDESGLAPTTEVKPRLDIQEEEIPFTTVTCENPLLLKGKTQVITKGVNGHRSNFYSVSTSADGKEVKTLVNSVVAQEAVTQIVEVGTMVTHVGDENGQAAIAEEKPKLEIPSQPAPSTAPAEESKVLPQDPAPVVTEKKLEHHHHHH

SEQ ID NO: 220 - protein, 2341 aa, Artificial Sequence
  Description of Artificial Sequence: Synthetic hybrid polypeptide
MASDETLITHTAEKPKEEKMIVEEKADKALETKNIVERTEQSEPSSTEAIASEKKEDEAVTPKEEKVSAKPEEKAPRIESQASNQEKPLKEDAKAVTNEEVNQMIEDRKVDFNQNWYFKLNANSKEAIKPDADVSTWKKLDLPYDWSIFNDFDHESPAQNEGGQLNGGEAWYRKTFKLDEKDLKKNVRLTFDGVYMDSQVYVNGQLVGHYPNGYNQFSYDITKYLQKDGRENVIAVHAVNKQPSSRWYSGSGIYRDVTLQVTDKVHVEKNGTTILTPKLEEQQHGKVETHVTSKIVNTDDKDHELVAEYQIVERGGHAVTGLVRTASRTLKAHESTSLDAILEVERPKLWTVLNDKPALYELITRVYRDGQLVDAKKDLFGYRYYHWTPNEGFSLNGERIKFHGVSLHHDHGALGAEENYKAEYRRLKQMKEMGVNSIRTTHNPASEQTLQIAAELGLLVQEEAFDTWYGGKKPYDYGRFFEKDATHPEARKGEKWSDFDLRTMVERGKNNPAIFMWSIGNEIGEANGDAHSLATVKRLVKVIKDVDKTRYVTMGADKFRFGNGSGGHEKIADELDAVGFNYSEDNYKALRAKHPKWLIYGSETSSATRTRGSYYRPERELKHSNGPERNYEQSDYGNDRVGWGKTATASWTFDRDNAGYAGQFIWTGTDYIGEPTPWHNQNQTPVKSSYFGIVDTAGIPKHDFYLYQSQWVSVKKKPMVHLLPHWNWENKELASKVADSEGKIPVRAYSNASSVELFLNGKSLGLKTFNKKQTSDGRTYQEGANANELYLEWKVAYQPGTLEAIARDESGKEIARDKITTAGKPAAVRLIKEDHAIAADGKDLTYIYYEIVDSQGNVVPTANNLVRFQLHGQGQLVGVDNGEQASRERYKAQADGSWIRKAFNGKGVAIVKSTEQAGKFTLTAHSDLLKSNQVTVFTGKKEGQEKTVLGTEVPKVQTIIGEAPEMPTTVPFVYSDGSRAERPVTWSSVDVSKPGIVTVKGMADGREVEARVEVIALKSELPVVKRIAPNTDLNSVDKSVSYVLIDGSVEEYEVDKWEIAEEDKAKLAIPGSRIQATGYLEGQPIHATLVVEEGNPAAPAVPTVTVGGEAVTGLTSQKPMQYRTLAYGAKLPEVTASAKNAAVTVLQASAANGMRASIFIQPKDGGPLQTYAIQFLEEAPKIAHLSLQVEKADSLKEDQTVKLSVRAHYQDGTQAVLPADKVTFSTSGEGEVAIRKGMLELHKPGAVTLNAEYEGAKDQVELTIQANTEKKIAQSIRPVNVVTDLHQEPSLPATVTVEYDKGFPKTHKVTWQAIPKEKLDSYQTFEVLGKVEGIDLEARAKVSVEGIVSVEEVSVTTPIAEAPQLPESVRTYDSNGHVSSAKVAWDAIRPEQYAKEGVFTVNGRLEGTQLTTKLHVRVSAQTEQGANISDQWTGSELPLAFASDSNPSDPVSNVNDKLISYNNQPANRWTNWNRTNPEASVGVLFGDSGILSKRSVDNLSVGFHEDHGVGVPKSYVIEYYVGKTVPTAPKNPSFVGNEDHVFNDSANWKPVTNLKAPAQLKAGEMNHFSFDKVETYAVRIRMVKADNKRGTSITEVQIFAKQVAAAKQGQTRIQVDGKDLANFNPDLTDYYLESVDGKVPAVTASVSNNGLATVVPSVREGEPVRVIAKAENGDILGEYRLHFTKDKSLLSHKPVAAVKQARLLQVGQALELPTKVPVYFTGKDGYETKDLTVEWEEVPAENLTKAGQFTVRGRVLGSNLVAEITVRVTDKLGETLSDNPNYDENSNQAFASATNDIDKNSHDRVDYLNDGDHSENRRWTNWSPTPSSNPEVSAGVIFRENGKIVERTVTQGKVQFFADSGTDAPSKLVLERYVGPEFEVPTYYSNYQAYDADHPFNNPENWEAVPYRADKDIAAGDEINVTFKAIKAKAMRWRMERKADKSGVAMIEMTFLAPSELPQESTQSKILVDGKELADFAENRQDYQITYKGQRPKVSVEENNQVASTVVDSGEDSFPVLVRLVSESGKQVKEYRIHLTKEKPVSEKTVAAVQEDLPKIEFVEKDLAYKTVEKKDSTLYLGETRVEQEGKVGKERIFTAINPDGSKEEKLREVVEVPTDRIVLVGTKPVAQEAKKPQVSEKADTKPIDSSEASQTNKAQGSGSGGGGVSAQESSTYTVKEGDTLSEIAETHNTTVEKLAENNHIDNIHLIYVDQELVIDGPVAPVATPAPATYAAPAAQDETVSAPVAETPVVSETVVSTVSGSEAEAKEWIAQKESGGSYTATNGRYIGRYQLTDSYLNGDYSAENQERVADAYVAGRYGSWTAAKNFWLNNGWYLEHHHHHH

SEQ ID NO: 221 - protein, 1251 aa, Artificial Sequence
  Description of Artificial Sequence: Synthetic hybrid polypeptide
MASDETLITHTAEKPKEEKMIVEEKADKALETKNIVERTEQSEPSSTEAIASEKKEDEAVTPKEEKVSAKPEEKAPRIESQASNQEKPLKEDAKAVTNEEVNQMIEDRKVDFNQNWYFKLNANSKEAIKPDADVSTWKKLDLPYDWSIFNDFDHESPAQNEGGQLNGGEAWYRKTFKLDEKDLKKNVRLTFDGVYMDSQVYVNGQLVGHYPNGYNQFSYDITKYLQKDGRENVIAVHAVNKQPSSRWYSGSGIYRDVTLQVTDKVHVEKNGTTILTPKLEEQQHGKVETHVTSKIVNTDDKDHELVAEYQIVERGGHAVTGLVRTASRTLKAHESTSLDAILEVERPKLWTVLNDKPALYELITRVYRDGQLVDAKKDLFGYRYYHWTPNEGFSLNGERIKFHGVSLHHDHGALGAEENYKAEYRRLKQMKEMGVNSIRTTHNPASEQTLQIAAELGLLVQEEAFDTWYGGKKPYDYGRFFEKDATHPEARKGEKWSDFDLRTMVERGKNNPAIFMWSIGNEIGEANGDAHSLATVKRLVKVIKDVDKTRYVTMGADKFRFGNGSGGHEKIADELDAVGFNYSEDNYKALRAKHPKWLIYGSETSSATRTRGSYYRPERELKHSNGPERNYEQSDYGNDRVGWGKTATASWTFDRDNAGYAGQFIWTGTDYIGEPTPWHNQNQTPVKSSYFGIVDTAGIPKHDFYLYQSQWVSVKKKPMVHLLPHWNWENKELASKVADSEGKIPVRAYSNASSVELFLNGKSLGLKTFNKKQTSDGRTYQEGANANELYLEWKVAYQPGTLEAIARDESGKEIARDKITTAGKPAAVRLIKEDHAIAADGKDLTYIYYEIVDSQGNVVPTANNLVRFQLHGQGQLVGVDNGEQASRERYKAQADGSWIRKAFNGKGVAIVKSTEQAGKFTLTAHSDLLKSNQVTVFTGKKEGQEKTVLGTEVPKVQTIIGEAPEMPTTVPFVYSDGSRAERPVTWSSVDVSKPGIVTVKGMADGREVEARVEVIALKSELPVVKRIAPNTDLNSVDKSVSYVLIDGSVEEYEVDKWEIAEEDKAKGSGSGGGGVSAQESSTYTVKEGDTLSEIAETHNTTVEKLAENNHIDNIHLIYVDQELVIDGPVAPVATPAPATYAAPAAQDETVSAPVAETPVVSETVVSTVSGSEAEAKEWIAQKESGGSYTATNGRYIGRYQLTDSYLNGDYSAENQERVADAYVAGRYGSWTAAKNFWLNNGWYLEHHHHHH

SEQ ID NO: 222 - protein, 1286 aa, Artificial Sequence
  Description of Artificial Sequence: Synthetic hybrid polypeptide
MASIAEEDKAKLAIPGSRIQATGYLEGQPIHATLVVEEGNPAAPAVPTVTVGGEAVTGLTSQKPMQYRTLAYGAKLPEVTASAKNAAVTVLQASAANGMRASIFIQPKDGGPLQTYAIQFLEEAPKIAHLSLQVEKADSLKEDQTVKLSVRAHYQDGTQAVLPADKVTFSTSGEGEVAIRKGMLELHKPGAVTLNAEYEGAKDQVELTIQANTEKKIAQSIRPVNVVTDLHQEPSLPATVTVEYDKGFPKTHKVTWQAIPKEKLDSYQTFEVLGKVEGIDLEARAKVSVEGIVSVEEVSVTTPIAEAPQLPESVRTYDSNGHVSSAKVAWDAIRPEQYAKEGVFTVNGRLEGTQLTTKLHVRVSAQTEQGANISDQWTGSELPLAFASDSNPSDPVSNVNDKLISYNNQPANRWTNWNRTNPEASVGVLFGDSGILSKRSVDNLSVGFHEDHGVGVPKSYVIEYYVGKTVPTAPKNPSFVGNEDHVFNDSANWKPVTNLKAPAQLKAGEMNHFSFDKVETYAVRIRMVKADNKRGTSITEVQIFAKQVAAAKQGQTRIQVDGKDLANFNPDLTDYYLESVDGKVPAVTASVSNNGLATVVPSVREGEPVRVIAKAENGDILGEYRLHFTKDKSLLSHKPVAAVKQARLLQVGQALELPTKVPVYFTGKDGYETKDLTVEWEEVPAENLTKAGQFTVRGRVLGSNLVAEITVRVTDKLGETLSDNPNYDENSNQAFASATNDIDKNSHDRVDYLNDGDHSENRRWTNWSPTPSSNPEVSAGVIFRENGKIVERTVTQGKVQFFADSGTDAPSKLVLERYVGPEFEVPTYYSNYQAYDADHPFNNPENWEAVPYRADKDIAAGDEINVTFKAIKAKAMRWRMERKADKSGVAMIEMTFLAPSELPQESTQSKILVDGKELADFAENRQDYQITYKGQRPKVSVEENNQVASTVVDSGEDSFPVLVRLVSESGKQVKEYRIHLTKEKPVSEKTVAAVQEDLPKIEFVEKDLAYKTVEKKDSTLYLGETRVEQEGKVGKERIFTAINPDGSKEEKLREVVEVPTDRIVLVGTKPVAQEAKKPQVSEKADTKPIDSSEASQTNKAQGSGSGGGGVSAQESSTYTVKEGDTLSEIAETHNTTVEKLAENNHIDNIHLIYVDQELVIDGPVAPVATPAPATYAAPAAQDETVSAPVAETPVVSETVVSTVSGSEAEAKEWIAQKESGGSYTATNGRYIGRYQLTDSYLNGDYSAENQERVADAYVAGRYGSWTAAKNFWLNNGWYLEHHHHHH

SEQ ID NO: 223 - protein, 2541 aa, Artificial Sequence
  Description of Artificial Sequence: Synthetic hybrid polypeptide
MASDETLITHTAEKPKEEKMIVEEKADKALETKNIVERTEQSEPSSTEAIASEKKEDEAVTPKEEKVSAKPEEKAPRIESQASNQEKPLKEDAKAVTNEEVNQMIEDRKVDFNQNWYFKLNANSKEAIKPDADVSTWKKLDLPYDWSIFNDFDHESPAQNEGGQLNGGEAWYRKTFKLDEKDLKKNVRLTFDGVYMDSQVYVNGQLVGHYPNGYNQFSYDITKYLQKDGRENVIAVHAVNKQPSSRWYSGSGIYRDVTLQVTDKVHVEKNGTTILTPKLEEQQHGKVETHVTSKIVNTDDKDHELVAEYQIVERGGHAVTGLVRTASRTLKAHESTSLDAILEVERPKLWTVLNDKPALYELITRVYRDGQLVDAKKDLFGYRYYHWTPNEGFSLNGERIKFHGVSLHHDHGALGAEENYKAEYRRLKQMKEMGVNSIRTTHNPASEQTLQIAAELGLLVQEEAFDTWYGGKKPYDYGRFFEKDATHPEARKGEKWSDFDLRTMVERGKNNPAIFMWSIGNEIGEANGDAHSLATVKRLVKVIKDVDKTRYVTMGADKFRFGNGSGGHEKIADELDAVGFNYSEDNYKALRAKHPKWLIYGSETSSATRTRGSYYRPERELKHSNGPERNYEQSDYGNDRVGWGKTATASWTFDRDNAGYAGQFIWTGTDYIGEPTPWHNQNQTPVKSSYFGIVDTAGIPKHDFYLYQSQWVSVKKKPMVHLLPHWNWENKELASKVADSEGKIPVRAYSNASSVELFLNGKSLGLKTFNKKQTSDGRTYQEGANANELYLEWKVAYQPGTLEAIARDESGKEIARDKITTAGKPAAVRLIKEDHAIAADGKDLTYIYYEIVDSQGNVVPTANNLVRFQLHGQGQLVGVDNGEQASRERYKAQADGSWIRKAFNGKGVAIVKSTEQAGKFTLTAHSDLLKSNQVTVFTGKKEGQEKTVLGTEVPKVQTIIGEAPEMPTTVPFVYSDGSRAERPVTWSSVDVSKPGIVTVKGMADGREVEARVEVIALKSELPVVKRIAPNTDLNSVDKSVSYVLIDGSVEEYEVDKWEIAEEDKAKLAIPGSRIQATGYLEGQPIHATLVVEEGNPAAPAVPTVTVGGEAVTGLTSQKPMQYRTLAYGAKLPEVTASAKNAAVTVLQASAANGMRASIFIQPKDGGPLQTYAIQFLEEAPKIAHLSLQVEKADSLKEDQTVKLSVRAHYQDGTQAVLPADKVTFSTSGEGEVAIRKGMLELHKPGAVTLNAEYEGAKDQVELTIQANTEKKIAQSIRPVNVVTDLHQEPSLPATVTVEYDKGFPKTHKVTWQAIPKEKLDSYQTFEVLGKVEGIDLEARAKVSVEGIVSVEEVSVTTPIAEAPQLPESVRTYDSNGHVSSAKVAWDAIRPEQYAKEGVFTVNGRLEGTQLTTKLHVRVSAQTEQGANISDQWTGSELPLAFASDSNPSDPVSNVNDKLISYNNQPANRWTNWNRTNPEASVGVLFGDSGILSKRSVDNLSVGFHEDHGVGVPKSYVIEYYVGKTVPTAPKNPSFVGNEDHVFNDSANWKPVTNLKAPAQLKAGEMNHFSFDKVETYAVRIRMVKADNKRGTSITEVQIFAKQVAAAKQGQTRIQVDGKDLANFNPDLTDYYLESVDGKVPAVTASVSNNGLATVVPSVREGEPVRVIAKAENGDILGEYRLHFTKDKSLLSHKPVAAVKQARLLQVGQALELPTKVPVYFTGKDGYETKDLTVEWEEVPAENLTKAGQFTVRGRVLGSNLVAEITVRVTDKLGETLSDNPNYDENSNQAFASATNDIDKNSHDRVDYLNDGDHSENRRWTNWSPTPSSNPEVSAGVIFRENGKIVERTVTQGKVQFFADSGTDAPSKLVLERYVGPEFEVPTYYSNYQAYDADHPFNNPENWEAVPYRADKDIAAGDEINVTFKAIKAKAMRWRMERKADKSGVAMIEMTFLAPSELPQESTQSKILVDGKELADFAENRQDYQITYKGQRPKVSVEENNQVASTVVDSGEDSFPVLVRLVSESGKQVKEYRIHLTKEKPVSEKTVAAVQEDLPKIEFVEKDLAYKTVEKKDSTLYLGETRVEQEGKVGKERIFTAINPDGSKEEKLREVVEVPTDRIVLVGTKPVAQEAKKPQVSEKADTKPIDSSEASQTNKAQGSGSGGGGAETTDDKIAAQDNKISNLTAQQQEAQKQVDQIQEQVSAIQAEQSNLQAENDRLQAESKKLEGEITELSKNIVSRNQSLEKQARSAQTNGAVTSYINTIVNSKSITEAISRVAAMSEIVSANNKMLEQQKADKKAISEKQVANNDAINTVIANQQKLADDAQALTTKQAELKAAELSLAAEKATAEGEKASLLEQKAAAEAEARAAAVAEAAYKEKRASQQQSVLASANTNLTAQVQAVSESAAAPVRAKVRPTYSTNASSYPIGECTWGVKTLAPWAGDYWGNGAQWATSAAAAGFRTGSTPQVGAIACWNDGGYGHVAVVTAVESTTRIQVSESNYAGNRTIGNHRGWFNPTTTSEGFVTYIYADAAALEHHHHHH

SEQ ID NO: 224 - protein, 1451 aa, Artificial Sequence
  Description of Artificial Sequence: Synthetic hybrid polypeptide
MASDETLITHTAEKPKEEKMIVEEKADKALETKNIVERTEQSEPSSTEAIASEKKEDEAVTPKEEKVSAKPEEKAPRIESQASNQEKPLKEDAKAVTNEEVNQMIEDRKVDFNQNWYFKLNANSKEAIKPDADVSTWKKLDLPYDWSIFNDFDHESPAQNEGGQLNGGEAWYRKTFKLDEKDLKKNVRLTFDGVYMDSQVYVNGQLVGHYPNGYNQFSYDITKYLQKDGRENVIAVHAVNKQPSSRWYSGSGIYRDVTLQVTDKVHVEKNGTTILTPKLEEQQHGKVETHVTSKIVNTDDKDHELVAEYQIVERGGHAVTGLVRTASRTLKAHESTSLDAILEVERPKLWTVLNDKPALYELITRVYRDGQLVDAKKDLFGYRYYHWTPNEGFSLNGERIKFHGVSLHHDHGALGAEENYKAEYRRLKQMKEMGVNSIRTTHNPASEQTLQIAAELGLLVQEEAFDTWYGGKKPYDYGRFFEKDATHPEARKGEKWSDFDLRTMVERGKNNPAIFMWSIGNEIGEANGDAHSLATVKRLVKVIKDVDKTRYVTMGADKFRFGNGSGGHEKIADELDAVGFNYSEDNYKALRAKHPKWLIYGSETSSATRTRGSYYRPERELKHSNGPERNYEQSDYGNDRVGWGKTATASWTFDRDNAGYAGQFIWTGTDYIGEPTPWHNQNQTPVKSSYFGIVDTAGIPKHDFYLYQSQWVSVKKKPMVHLLPHWNWENKELASKVADSEGKIPVRAYSNASSVELFLNGKSLGLKTFNKKQTSDGRTYQEGANANELYLEWKVAYQPGTLEAIARDESGKEIARDKITTAGKPAAVRLIKEDHAIAADGKDLTYIYYEIVDSQGNVVPTANNLVRFQLHGQGQLVGVDNGEQASRERYKAQADGSWIRKAFNGKGVAIVKSTEQAGKFTLTAHSDLLKSNQVTVFTGKKEGQEKTVLGTEVPKVQTIIGEAPEMPTTVPFVYSDGSRAERPVTWSSVDVSKPGIVTVKGMADGREVEARVEVIALKSELPVVKRIAPNTDLNSVDKSVSYVLIDGSVEEYEVDKWEIAEEDKAKGSGSGGGGAETTDDKIAAQDNKISNLTAQQQEAQKQVDQIQEQVSAIQAEQSNLQAENDRLQAESKKLEGEITELSKNIVSRNQSLEKQARSAQTNGAVTSYINTIVNSKSITEAISRVAAMSEIVSANNKMLEQQKADKKAISEKQVANNDAINTVIANQQKLADDAQALTTKQAELKAAELSLAAEKATAEGEKASLLEQKAAAEAEARAAAVAEAAYKEKRASQQQSVLASANTNLTAQVQAVSESAAAPVRAKVRPTYSTNASSYPIGECTWGVKTLAPWAGDYWGNGAQWATSAAAAGFRTGSTPQVGAIACWNDGGYGHVAVVTAVESTTRIQVSESNYAGNRTIGNHRGWFNPTTTSEGFVTYIYADAAALEHHHHHH

SEQ ID NO: 225 - protein, 1486 aa, Artificial Sequence
  Description of Artificial Sequence: Synthetic hybrid polypeptide
MASIAEEDKAKLAIPGSRIQATGYLEGQPIHATLVVEEGNPAAPAVPTVTVGGEAVTGLTSQKPMQYRTLAYGAKLPEVTASAKNAAVTVLQASAANGMRASIFIQPKDGGPLQTYAIQFLEEAPKIAHLSLQVEKADSLKEDQTVKLSVRAHYQDGTQAVLPADKVTFSTSGEGEVAIRKGMLELHKPGAVTLNAEYEGAKDQVELTIQANTEKKIAQSIRPVNVVTDLHQEPSLPATVTVEYDKGFPKTHKVTWQAIPKEKLDSYQTFEVLGKVEGIDLEARAKVSVEGIVSVEEVSVTTPIAEAPQLPESVRTYDSNGHVSSAKVAWDAIRPEQYAKEGVFTVNGRLEGTQLTTKLHVRVSAQTEQGANISDQWTGSELPLAFASDSNPSDPVSNVNDKLISYNNQPANRWTNWNRTNPEASVGVLFGDSGILSKRSVDNLSVGFHEDHGVGVPKSYVIEYYVGKTVPTAPKNPSFVGNEDHVFNDSANWKPVTNLKAPAQLKAGEMNHFSFDKVETYAVRIRMVKADNKRGTSITEVQIFAKQVAAAKQGQTRIQVDGKDLANFNPDLTDYYLESVDGKVPAVTASVSNNGLATVVPSVREGEPVRVIAKAENGDILGEYRLHFTKDKSLLSHKPVAAVKQARLLQVGQALELPTKVPVYFTGKDGYETKDLTVEWEEVPAENLTKAGQFTVRGRVLGSNLVAEITVRVTDKLGETLSDNPNYDENSNQAFASATNDIDKNSHDRVDYLNDGDHSENRRWTNWSPTPSSNPEVSAGVIFRENGKIVERTVTQGKVQFFADSGTDAPSKLVLERYVGPEFEVPTYYSNYQAYDADHPFNNPENWEAVPYRADKDIAAGDEINVTFKAIKAKAMRWRMERKADKSGVAMIEMTFLAPSELPQESTQSKILVDGKELADFAENRQDYQITYKGQRPKVSVEENNQVASTVVDSGEDSFPVLVRLVSESGKQVKEYRIHLTKEKPVSEKTVAAVQEDLPKIEFVEKDLAYKTVEKKDSTLYLGETRVEQEGKVGKERIFTAINPDGSKEEKLREVVEVPTDRIVLVGTKPVAQEAKKPQVSEKADTKPIDSSEASQTNKAQGSGSGGGGAETTDDKIAAQDNKISNLTAQQQEAQKQVDQIQEQVSAIQAEQSNLQAENDRLQAESKKLEGEITELSKNIVSRNQSLEKQARSAQTNGAVTSYINTIVNSKSITEAISRVAAMSEIVSANNKMLEQQKADKKAISEKQVANNDAINTVIANQQKLADDAQALTTKQAELKAAELSLAAEKATAEGEKASLLEQKAAAEAEARAAAVAEAAYKEKRASQQQSVLASANTNLTAQVQAVSESAAAPVRAKVRPTYSTNASSYPIGECTWGVKTLAPWAGDYWGNGAQWATSAAAAGFRTGSTPQVGAIACWNDGGYGHVAVVTAVESTTRIQVSESNYAGNRTIGNHRGWFNPTTTSEGFVTYIYADAAALEHHHHHH

SEQ ID NO: 226 - protein, 2996 aa, Artificial Sequence
  Description of Artificial Sequence: Synthetic hybrid polypeptide
MASDETLITHTAEKPKEEKMIVEEKADKALETKNIVERTEQSEPSSTEAIASEKKEDEAVTPKEEKVSAKPEEKAPRIESQASNQEKPLKEDAKAVTNEEVNQMIEDRKVDFNQNWYFKLNANSKEAIKPDADVSTWKKLDLPYDWSIFNDFDHESPAQNEGGQLNGGEAWYRKTFKLDEKDLKKNVRLTFDGVYMDSQVYVNGQLVGHYPNGYNQFSYDITKYLQKDGRENVIAVHAVNKQPSSRWYSGSGIYRDVTLQVTDKVHVEKNGTTILTPKLEEQQHGKVETHVTSKIVNTDDKDHELVAEYQIVERGGHAVTGLVRTASRTLKAHESTSLDAILEVERPKLWTVLNDKPALYELITRVYRDGQLVDAKKDLFGYRYYHWTPNEGFSLNGERIKFHGVSLHHDHGALGAEENYKAEYRRLKQMKEMGVNSIRTTHNPASEQTLQIAAELGLLVQEEAFDTWYGGKKPYDYGRFFEKDATHPEARKGEKWSDFDLRTMVERGKNNPAIFMWSIGNEIGEANGDAHSLATVKRLVKVIKDVDKTRYVTMGADKFRFGNGSGGHEKIADELDAVGFNYSEDNYKALRAKHPKWLIYGSETSSATRTRGSYYRPERELKHSNGPERNYEQSDYGNDRVGWGKTATASWTFDRDNAGYAGQFIWTGTDYIGEPTPWHNQNQTPVKSSYFGIVDTAGIPKHDFYLYQSQWVSVKKKPMVHLLPHWNWENKELASKVADSEGKIPVRAYSNASSVELFLNGKSLGLKTFNKKQTSDGRTYQEGANANELYLEWKVAYQPGTLEAIARDESGKEIARDKITTAGKPAAVRLIKEDHAIAADGKDLTYIYYEIVDSQGNVVPTANNLVRFQLHGQGQLVGVDNGEQASRERYKAQADGSWIRKAFNGKGVAIVKSTEQAGKFTLTAHSDLLKSNQVTVFTGKKEGQEKTVLGTEVPKVQTIIGEAPEMPTTVPFVYSDGSRAERPVTWSSVDVSKPGIVTVKGMADGREVEARVEVIALKSELPVVKRIAPNTDLNSVDKSVSYVLIDGSVEEYEVDKWEIAEEDKAKLAIPGSRIQATGYLEGQPIHATLVVEEGNPAAPAVPTVTVGGEAVTGLTSQKPMQYRTLAYGAKLPEVTASAKNAAVTVLQASAANGMRASIFIQPKDGGPLQTYAIQFLEEAPKIAHLSLQVEKADSLKEDQTVKLSVRAHYQDGTQAVLPADKVTFSTSGEGEVAIRKGMLELHKPGAVTLNAEYEGAKDQVELTIQANTEKKIAQSIRPVNVVTDLHQEPSLPATVTVEYDKGFPKTHKVTWQAIPKEKLDSYQTFEVLGKVEGIDLEARAKVSVEGIVSVEEVSVTTPIAEAPQLPESVRTYDSNGHVSSAKVAWDAIRPEQYAKEGVFTVNGRLEGTQLTTKLHVRVSAQTEQGANISDQWTGSELPLAFASDSNPSDPVSNVNDKLISYNNQPANRWTNWNRTNPEASVGVLFGDSGILSKRSVDNLSVGFHEDHGVGVPKSYVIEYYVGKTVPTAPKNPSFVGNEDHVFNDSANWKPVTNLKAPAQLKAGEMNHFSFDKVETYAVRIRMVKADNKRGTSITEVQIFAKQVAAAKQGQTRIQVDGKDLANFNPDLTDYYLESVDGKVPAVTASVSNNGLATVVPSVREGEPVRVIAKAENGDILGEYRLHFTKDKSLLSHKPVAAVKQARLLQVGQALELPTKVPVYFTGKDGYETKDLTVEWEEVPAENLTKAGQFTVRGRVLGSNLVAEITVRVTDKLGETLSDNPNYDENSNQAFASATNDIDKNSHDRVDYLNDGDHSENRRWTNWSPTPSSNPEVSAGVIFRENGKIVERTVTQGKVQFFADSGTDAPSKLVLERYVGPEFEVPTYYSNYQAYDADHPFNNPENWEAVPYRADKDIAAGDEINVTFKAIKAKAMRWRMERKADKSGVAMIEMTFLAPSELPQESTQSKILVDGKELADFAENRQDYQITYKGQRPKVSVEENNQVASTVVDSGEDSFPVLVRLVSESGKQVKEYRIHLTKEKPVSEKTVAAVQEDLPKIEFVEKDLAYKTVEKKDSTLYLGETRVEQEGKVGKERIFTAINPDGSKEEKLREVVEVPTDRIVLVGTKPVAQEAKKPQVSEKADTKPIDSSEASQTNKAQGSGSGGGGETPETSPAIGKVVIKETGEGGALLGDAVFELKNNTDGTTVSQRTEAQTGEAIFSNIKPGTYTLTEAQPPVGYKPSTKQWTVEVEKNGRTTVQGEQVENREEALSDQYPQTGTYPDVQTPYQIIKVDGSEKNGQHKALNPNPYERVIPEGTLSKRIYQVNNLDDNQYGIELTVSGKTVYEQKDKSVPLDVVILLDNSNSMSNIRNKNARRAERAGEATRSLIDKITSDSENRVALVTYASTIFDGTEFTVEKGVADKNGKRLNDSLFWNYDQTSFTTNTKDYSYLKLTNDKNDIVELKNKVPTEAEDHDGNRLMYQFGATFTQKALMKADEILTQQARQNSQKVIFHITDGVPTMSYPINFNHATFAPSYQNQLNAFFSKSPNKDGILLSDFITQATSGEHTIVRGDGQSYQMFTDKTVYEKGAPAAFPVKPEKYSEMKAAGYAVIGDPINGGYIWLNWRESILAYPFNSNTAKITNHGDPTRWYYNGNIAPDGYDVFTVGIGINGDPGTDEATATSFMQSISSKPENYTNVTDTTKILEQLNRYFHTIVTEKKSIENGTITDPMGELIDLQLGTDGRFDPADYTLTANDGSRLENGQAVGGPQNDGGLLKNAKVLYDTTEKRIRVTGLYLGTDEKVTLTYNVRLNDEFVSNKFYDTNGRTTLHPKEVEQNTVRDFPIPKIRDVRKYPEITISKEKKLGDIEFIKVNKNDKKPLRGAVFSLQKQHPDYPDIYGAIDQNGTYQNVRTGEDGKLTFKNLSDGKYRLFENSEPAGYKPVQNKPIVAFQIVNGEVRDVTSIVPQDIPAGYEFTNDKHYITNEPIPPKRELEHHHHHH

SEQ ID NO: 227 - protein, 1906 aa, Artificial Sequence
  Description of Artificial Sequence: Synthetic hybrid polypeptide
MASDETLITHTAEKPKEEKMIVEEKADKALETKNIVERTEQSEPSSTEAIASEKKEDEAVTPKEEKVSAKPEEKAPRIESQASNQEKPLKEDAKAVTNEEVNQMIEDRKVDFNQNWYFKLNANSKEAIKPDADVSTWKKLDLPYDWSIFNDFDHESPAQNEGGQLNGGEAWYRKTFKLDEKDLKKNVRLTFDGVYMDSQVYVNGQLVGHYPNGYNQFSYDITKYLQKDGRENVIAVHAVNKQPSSRWYSGSGIYRDVTLQVTDKVHVEKNGTTILTPKLEEQQHGKVETHVTSKIVNTDDKDHELVAEYQIVERGGHAVTGLVRTASRTLKAHESTSLDAILEVERPKLWTVLNDKPALYELITRVYRDGQLVDAKKDLFGYRYYHWTPNEGFSLNGERIKFHGVSLHHDHGALGAEENYKAEYRRLKQMKEMGVNSIRTTHNPASEQTLQIAAELGLLVQEEAFDTWYGGKKPYDYGRFFEKDATHPEARKGEKWSDFDLRTMVERGKNNPAIFMWSIGNEIGEANGDAHSLATVKRLVKVIKDVDKTRYVTMGADKFRFGNGSGGHEKIADELDAVGFNYSEDNYKALRAKHPKWLIYGSETSSATRTRGSYYRPERELKHSNGPERNYEQSDYGNDRVGWGKTATASWTFDRDNAGYAGQFIWTGTDYIGEPTPWHNQNQTPVKSSYFGIVDTAGIPKHDFYLYQSQWVSVKKKPMVHLLPHWNWENKELASKVADSEGKIPVRAYSNASSVELFLNGKSLGLKTFNKKQTSDGRTYQEGANANELYLEWKVAYQPGTLEAIARDESGKEIARDKITTAGKPAAVRLIKEDHAIAADGKDLTYIYYEIVDSQGNVVPTANNLVRFQLHGQGQLVGVDNGEQASRERYKAQADGSWIRKAFNGKGVAIVKSTEQAGKFTLTAHSDLLKSNQVTVFTGKKEGQEKTVLGTEVPKVQTIIGEAPEMPTTVPFVYSDGSRAERPVTWSSVDVSKPGIVTVKGMADGREVEARVEVIALKSELPVVKRIAPNTDLNSVDKSVSYVLIDGSVEEYEVDKWEIAEEDKAKGSGSGGGGETPETSPAIGKVVIKETGEGGALLGDAVFELKNNTDGTTVSQRTEAQTGEAIFSNIKPGTYTLTEAQPPVGYKPSTKQWTVEVEKNGRTTVQGEQVENREEALSDQYPQTGTYPDVQTPYQIIKVDGSEKNGQHKALNPNPYERVIPEGTLSKRIYQVNNLDDNQYGIELTVSGKTVYEQKDKSVPLDVVILLDNSNSMSNIRNKNARRAERAGEATRSLIDKITSDSENRVALVTYASTIFDGTEFTVEKGVADKNGKRLNDSLFWNYDQTSFTTNTKDYSYLKLTNDKNDIVELKNKVPTEAEDHDGNRLMYQFGATFTQKALMKADEILTQQARQNSQKVIFHITDGVPTMSYPINFNHATFAPSYQNQLNAFFSKSPNKDGILLSDFITQATSGEHTIVRGDGQSYQMFTDKTVYEKGAPAAFPVKPEKYSEMKAAGYAVIGDPINGGYIWLNWRESILAYPFNSNTAKITNHGDPTRWYYNGNIAPDGYDVFTVGIGINGDPGTDEATATSFMQSISSKPENYTNVTDTTKILEQLNRYFHTIVTEKKSIENGTITDPMGELIDLQLGTDGRFDPADYTLTANDGSRLENGQAVGGPQNDGGLLKNAKVLYDTTEKRIRVTGLYLGTDEKVTLTYNVRLNDEFVSNKFYDTNGRTTLHPKEVEQNTVRDFPIPKIRDVRKYPEITISKEKKLGDIEFIKVNKNDKKPLRGAVFSLQKQHPDYPDIYGAIDQNGTYQNVRTGEDGKLTFKNLSDGKYRLFENSEPAGYKPVQNKPIVAFQIVNGEVRDVTSIVPQDIPAGYEFTNDKHYITNEPIPPKRELEHHHHHH

SEQ ID NO: 228 - protein, 1941 aa, Artificial Sequence
  Description of Artificial Sequence: Synthetic hybrid polypeptide
MASIAEEDKAKLAIPGSRIQATGYLEGQPIHATLVVEEGNPAAPAVPTVTVGGEAVTGLTSQKPMQYRTLAYGAKLPEVTASAKNAAVTVLQASAANGMRASIFIQPKDGGPLQTYAIQFLEEAPKIAHLSLQVEKADSLKEDQTVKLSVRAHYQDGTQAVLPADKVTFSTSGEGEVAIRKGMLELHKPGAVTLNAEYEGAKDQVELTIQANTEKKIAQSIRPVNVVTDLHQEPSLPATVTVEYDKGFPKTHKVTWQAIPKEKLDSYQTFEVLGKVEGIDLEARAKVSVEGIVSVEEVSVTTPIAEAPQLPESVRTYDSNGHVSSAKVAWDAIRPEQYAKEGVFTVNGRLEGTQLTTKLHVRVSAQTEQGANISDQWTGSELPLAFASDSNPSDPVSNVNDKLISYNNQPANRWTNWNRTNPEASVGVLFGDSGILSKRSVDNLSVGFHEDHGVGVPKSYVIEYYVGKTVPTAPKNPSFVGNEDHVFNDSANWKPVTNLKAPAQLKAGEMNHFSFDKVETYAVRIRMVKADNKRGTSITEVQIFAKQVAAAKQGQTRIQVDGKDLANFNPDLTDYYLESVDGKVPAVTASVSNNGLATVVPSVREGEPVRVIAKAENGDILGEYRLHFTKDKSLLSHKPVAAVKQARLLQVGQALELPTKVPVYFTGKDGYETKDLTVEWEEVPAENLTKAGQFTVRGRVLGSNLVAEITVRVTDKLGETLSDNPNYDENSNQAFASATNDIDKNSHDRVDYLNDGDHSENRRWTNWSPTPSSNPEVSAGVIFRENGKIVERTVTQGKVQFFADSGTDAPSKLVLERYVGPEFEVPTYYSNYQAYDADHPFNNPENWEAVPYRADKDIAAGDEINVTFKAIKAKAMRWRMERKADKSGVAMIEMTFLAPSELPQESTQSKILVDGKELADFAENRQDYQITYKGQRPKVSVEENNQVASTVVDSGEDSFPVLVRLVSESGKQVKEYRIHLTKEKPVSEKTVAAVQEDLPKIEFVEKDLAYKTVEKKDSTLYLGETRVEQEGKVGKERIFTAINPDGSKEEKLREVVEVPTDRIVLVGTKPVAQEAKKPQVSEKADTKPIDSSEASQTNKAQGSGSGGGGETPETSPAIGKVVIKETGEGGALLGDAVFELKNNTDGTTVSQRTEAQTGEAIFSNIKPGTYTLTEAQPPVGYKPSTKQWTVEVEKNGRTTVQGEQVENREEALSDQYPQTGTYPDVQTPYQIIKVDGSEKNGQHKALNPNPYERVIPEGTLSKRIYQVNNLDDNQYGIELTVSGKTVYEQKDKSVPLDVVILLDNSNSMSNIRNKNARRAERAGEATRSLIDKITSDSENRVALVTYASTIFDGTEFTVEKGVADKNGKRLNDSLFWNYDQTSFTTNTKDYSYLKLTNDKNDIVELKNKVPTEAEDHDGNRLMYQFGATFTQKALMKADEILTQQARQNSQKVIFHITDGVPTMSYPINFNHATFAPSYQNQLNAFFSKSPNKDGILLSDFITQATSGEHTIVRGDGQSYQMFTDKTVYEKGAPAAFPVKPEKYSEMKAAGYAVIGDPINGGYIWLNWRESILAYPFNSNTAKITNHGDPTRWYYNGNIAPDGYDVFTVGIGINGDPGTDEATATSFMQSISSKPENYTNVTDTTKILEQLNRYFHTIVTEKKSIENGTITDPMGELIDLQLGTDGRFDPADYTLTANDGSRLENGQAVGGPQNDGGLLKNAKVLYDTTEKRIRVTGLYLGTDEKVTLTYNVRLNDEFVSNKFYDTNGRTTLHPKEVEQNTVRDFPIPKIRDVRKYPEITISKEKKLGDIEFIKVNKNDKKPLRGAVFSLQKQHPDYPDIYGAIDQNGTYQNVRTGEDGKLTFKNLSDGKYRLFENSEPAGYKPVQNKPIVAFQIVNGEVRDVTSIVPQDIPAGYEFTNDKHYITNEPIPPKRELEHHHHHH

SEQ ID NO: 229 - protein, 141 aa, Streptococcus pneumoniae
VSAQESSTYTVKEGDTLSEIAETHNTTVEKLAENNHIDNIHLIYVDQELVIDGPVAPVATPAPATYAAPAAQDETVSAPVAETPVVSETVVSTVSGSEAEAKEWIAQKESGGSYTATNGRYIGRYGSWTAAKNFWLNNGWY

SEQ ID NO: 230 - DNA, 26 bp, Artificial Sequence
  Description of Artificial Sequence: Synthetic poly(dIdC) oligonucleotide for IC-31
  modified_base (1)..(1): Inosine
  modified_base (3)..(3): Inosine
  modified_base (5)..(5): Inosine
  modified_base (7)..(7): Inosine
  modified_base (9)..(9): Inosine
  modified_base (11)..(11): Inosine
  modified_base (13)..(13): Inosine
  modified_base (15)..(15): Inosine
  modified_base (17)..(17): Inosine
  modified_base (19)..(19): Inosine
  modified_base (21)..(21): Inosine
  modified_base (23)..(23): Inosine
  modified_base (25)..(25): Inosine
ncncncncncncncncncncncncnc

SEQ ID NO: 231 - protein, 11 aa, Artificial Sequence
  Description of Artificial Sequence: Synthetic polycationic polymer for IC-31 peptide
KLKLLLLLKLK

SEQ ID NO: 232 - protein, 6 aa, Artificial Sequence
  Description of Artificial Sequence: Synthetic glycine-rich linker peptide
GSGGGG

SEQ ID NO: 233 - protein, 8 aa, Artificial Sequence
  Description of Artificial Sequence: Synthetic glycine-rich linker peptide
GSGSGGGG

SEQ ID NO: 234 - protein, 6 aa, Artificial Sequence
  Description of Artificial Sequence: Synthetic 6xHis tag
HHHHHH

SEQ ID NO: 235 - protein, 5 aa, Artificial Sequence
  Description of Artificial Sequence: Synthetic linker peptide
AAALE

SEQ ID NO: 236 - protein, 665 aa, Streptococcus pneumoniae; identical to SEQ ID NO: 56

SEQ ID NO: 237 - protein, 644 aa, Streptococcus pneumoniae; identical to SEQ ID NO: 174

SEQ ID NO: 238 - protein, 654 aa, Streptococcus pneumoniae; identical to SEQ ID NO: 175

SEQ ID NO: 239 - protein, 604 aa, Streptococcus pneumoniae
  Fragment of SEQ ID NO: 236
AATVFAAGTTTTSVTVHKLLATDGDMDKIANELETGNYAGNKVGVLPANAKEIAGVMFVWTNTNNEIIDENGQTLGVNIDPQTFKLSGAMPATAMKKLTEAEGAKFNTANLPAAKYKIYEIHSLSTYVGEDGATLTGSKAVPIEIELPLNDVVDAHVYPKNTEAKPKIDKDFKGKANPDTPRVDKDTPVNHQVGDVVEYEIVTKIPALANYATANWSDRMTEGLAFNKGTVKVTVDDVALEAGDYALTEVATGFDLKLTDAGLAKVNDQNAEKTVKITYSATLNDKAIVEVPESNDVTFNYGNNPDHGNTPKPNKPNENGDLTLTKTWVDATGAPIPAGAEATFDLVNAQTGKVVQTVTLTTDKNTVTVNGLDKNTEYKFVERSIKGYSADYQEITTAGEIAVKNWKDENPKPLDPTEPKVVTYGKKFVKVNDKDNRLAGAEFVIANADNAGQYLARKADKVSQEEKQLVVTTKDALDRAVAAYNALTAQQQTQQEKEKVDKAQAAYNAAVIAANNAFEWVADKDNENVVKLVSDAQGRFEITGLLAGTYYLEETKQPAGYALLTSRQKFEVTATSYSATGQGIEYTAGSGKDDATKVVNKKIT

SEQ ID NO: 240 - protein, 583 aa, Streptococcus pneumoniae
  Fragment of SEQ ID NO: 237
AATVFAADNVSTAPDAVTKTLTIHKLLLSEDDLKTWDTNGPKGYDGTQSSLKDLTGVVAEEIPNVYFELQKYNLTDGKEKENLKDDSKWTTVHGGLTTKDGLKIETSTLKGVYRIREDRTKTTYVGPNGQVLTGSKAVPALVTLPLVNNNGTVIDAHVFPKNSYNKPVVDKRIADTLNYNDQNGLSIGTKIPYVVNTTIPSNATFATSFWSDEMTEGLTYNEDVTITLNNVAMDQADYEVTKGNNGFNLKLTEAGLAKINGKDADQKIQITYSATLNSLAVADIPESNDITYHYGNHQDHGNTPKPTKPNNGQITVTKTWDSQPAPEGVKATVQLVNAKTGEKVGAPVELSENNWTYTWSGLDNSIEYKVEEEYNGYSAEYTVESKGKLGVKNWKDNNPAPINPEEPRVKTYGKKFVKVDQKDTRLENAQFVVKKADSNKYIAFKSTAQQAADEKAAATAKQKLDAAVAAYTNAADKQAAQALVDQAQQEYNVAYKEAKFGYVEVAGKDEAMVLTSNTDGQFQISGLAAGTYKLEEIKAPEGFAKIDDVEFVVGAGSWNQGEFNYLKDVQKNDATKVVNKKIT

SEQ ID NO: 241 - protein, 587 aa, Streptococcus pneumoniae
  Fragment of SEQ ID NO: 238
AEQKTKTLTVHKLLMTDQELDAWNSDAITTAGYDGSQNFEQFKQLQGVPQGVTEISGVAFELQSYTGPQGKEQENLTNDAVWTAVNKGVTTETGVKFDTEVLQGTYRLVEVRKESTYVGPNGKVLTGMKAVPALITLPLVNQNGVVENAHVYPKNSEDKPTATKTFDTAAGFVDPGEKGLAIGTKVPYIVTTTIPKNSTLATAFWSDEMTEGLDYNGDVVVNYNGQPLDNSHYTLEAGHNGFILKLNEKGLEAINGKDAEATITLKYTATLNALAVADVPEANDVTFHYGNNPGHGNTPKPNKPKNGELTITKTWADAKDAPIAGVEVTFDLVNAQTGEVVKVPGHETGIVLNQTNNWTFTATGLDNNTEYKFVERTIKGYSADYQTITETGKIAVKNWKDENPEPINPEEPRVKTYGKKFVKVDQKDERLKEAQFVVKNEQGKYLALKSAAQQAVNEKAAAEAKQALDAAIAAYTNAADKNAAQAVVDAAQKTYNDNYRAARFGYVEVERKEDALVLTSNTDGQFQISGLAAGSYTLEETKAPEGFAKLGDVKFEVGAGSWNQGDFNYLKDVQKNDATKVVNKKIT

SEQ ID NO: 242 - protein, 6 aa, Artificial Sequence
  Description of Artificial Sequence: Synthetic linker peptide
GSGGGG

SEQ ID NO: 243 - protein, 8 aa, Artificial Sequence
  Description of Artificial Sequence: Synthetic linker peptide
GSGSGGGG

SEQ ID NO: 244 - protein, 6 aa, Artificial Sequence
  Description of Artificial Sequence: Synthetic 6xHis tag
HHHHHH

SEQ ID NO: 245 - protein, 8 aa, Artificial Sequence
  Description of Artificial Sequence: Synthetic linker peptide
LGGSGGGG

SEQ ID NO: 246 - protein, 1801 aa, Artificial Sequence
  Description of Artificial Sequence: Synthetic RrgB I-II-III polypeptide
MASAATVFAAGTTTTSVTVHKLLATDGDMDKIANELETGNYAGNKVGVLPANAKEIAGVMFVWTNTNNEIIDENGQTLGVNIDPQTFKLSGAMPATAMKKLTEAEGAKFNTANLPAAKYKIYEIHSLSTYVGEDGATLTGSKAVPIEIELPLNDVVDAHVYPKNTEAKPKIDKDFKGKANPDTPRVDKDTPVNHQVGDVVEYEIVTKIPALANYATANWSDRMTEGLAFNKGTVKVTVDDVALEAGDYALTEVATGFDLKLTDAGLAKVNDQNAEKTVKITYSATLNDKAIVEVPESNDVTFNYGNNPDHGNTPKPNKPNENGDLTLTKTWVDATGAPIPAGAEATFDLVNAQTGKVVQTVTLTTDKNTVTVNGLDKNTEYKFVERSIKGYSADYQEITTAGEIAVKNWKDENPKPLDPTEPKVVTYGKKFVKVNDKDNRLAGAEFVIANADNAGQYLARKADKVSQEEKQLVVTTKDALDRAVAAYNALTAQQQTQQEKEKVDKAQAAYNAAVIAANNAFEWVADKDNENVVKLVSDAQGRFEITGLLAGTYYLEETKQPAGYALLTSRQKFEVTATSYSATGQGIEYTAGSGKDDATKVVNKKITGSGSGGGGAATVFAADNVSTAPDAVTKTLTIHKLLLSEDDLKTWDTNGPKGYDGTQSSLKDLTGVVAEEIPNVYFELQKYNLTDGKEKENLKDDSKWTTVHGGLTTKDGLKIETSTLKGVYRIREDRTKTTYVGPNGQVLTGSKAVPALVTLPLVNNNGTVIDAHVFPKNSYNKPVVDKRIADTLNYNDQNGLSIGTKIPYVVNTTIPSNATFATSFWSDEMTEGLTYNEDVTITLNNVAMDQADYEVTKGNNGFNLKLTEAGLAKINGKDADQKIQITYSATLNSLAVADIPESNDITYHYGNHQDHGNTPKPTKPNNGQITVTKTWDSQPAPEGVKATVQLVNAKTGEKVGAPVELSENNWTYTWSGLDNSIEYKVEEEYNGYSAEYTVESKGKLGVKNWKDNNPAPINPEEPRVKTYGKKFVKVDQKDTRLENAQFVVKKADSNKYIAFKSTAQQAADEKAAATAKQKLDAAVAAYTNAADKQAAQALVDQAQQEYNVAYKEAKFGYVEVAGKDEAMVLTSNTDGQFQISGLAAGTYKLEEIKAPEGFAKIDDVEFVVGAGSWNQGEFNYLKDVQKNDATKVVNKKITLGGSGGGGAEQKTKTLTVHKLLMTDQELDAWNSDAITTAGYDGSQNFEQFKQLQGVPQGVTEISGVAFELQSYTGPQGKEQENLTNDAVWTAVNKGVTTETGVKFDTEVLQGTYRLVEVRKESTYVGPNGKVLTGMKAVPALIILPLVNQNGVVENAHVYPKNSEDKPTATKTFDTAAGFVDPGEKGLAIGTKVPYIVTTTIPKNSTLATAFWSDEMTEGLDYNGDVVVNYNGQPLDNSHYTLEAGHNGFILKLNEKGLEAINGKDAEATITLKYTATLNALAVADVPEANDVTFHYGNNPGHGNTPKPNKPKNGELTITKTWADAKDAPIAGVEVTFDLVNAQTGEVVKVPGHETGIVLNQTNNWTFTATGLDNNTEYKFVERTIKGYSADYQTITETGKIAVKNWKDENPEPINPEEPRVKTYGKKFVKVDQKDERLKEAQFVVKNEQGKYLALKSAAQQAVNEKAAAEAKQALDAAIAAYTNAADKNAAQAVVDAAQKTYNDNYRAARFGYVEVERKEDALVLTSNTDGQFQISGLAAGSYTLEETKAPEGFAKLGDVKFEVGAGSWNQGDFNYLKDVQKNDATKVVNKKITLGHHHHHH

SEQ ID NO: 247 - DNA, 5403 bp, Artificial Sequence
  Description of Artificial Sequence: Synthetic polynucleotide
  Sequence encoding SEQ ID NO: 246
atggctagcgctgcaacagtttttgcggctgggacgacaacaacatctgttaccgttcataaactattggcaacagatggggatatggataaaattgcaaatgagttagaaacaggtaactatgctggtaataaagtgggtgttctacctgcaaatgcaaaagaaattgccggtgttatgttcgtttggacaaatactaataatgaaattattgatgaaaatggccaaactctaggagtgaatattgatccacaaacatttaaactctcaggggcaatgccggcaactgcaatgaaaaaattaacagaagctgaaggagctaaatttaacacggcaaatttaccagctgctaagtataaaatttatgaaattcacagtttatcaacttatgtcggtgaagatggagcaaccttaacaggttctaaagcagttccaattgaaattgaattaccattgaacgatgttgtggatgcgcatgtgtatccaaaaaatacagaagcaaagccaaaaattgataaagatttcaaaggtaaagcaaatccagatacaccacgtgtagataaagatacacctgtgaaccaccaagttggagatgttgtagagtacgaaattgttacaaaaattccagcacttgctaattatgcaacagcaaactggagcgatagaatgactgaaggtttggcattcaacaaaggtacagtgaaagtaactgttgatgatgttgcacttgaagcaggtgattatgctctaacagaagtagcaactggttttgatttgaaattaacagatgctggtttagctaaagtgaatgaccaaaacgctgaaaaaactgtgaaaatcacttattcggcaacattgaatgacaaagcaattgtagaagtaccagaatctaatgatgtaacatttaactatggtaataatccagatcacgggaatactccaaagccgaataagccaaatgaaaacggcgatttgacattgaccaagacatgggttgatgctacaggtgcaccaattccggctggagctgaagcaacgttcgatttggttaatgctcagactggtaaagttgtacaaactgtaactttgacaacagacaaaaatacagttactgttaacggattggataaaaatacagaatataaattcgttgaacgtagtataaaagggtattcagcagattatcaagaaatcactacagctggagaaattgctgtcaagaactggaaagacgaaaatccaaaaccacttgatccaacagagccaaaagttgttacatatggtaaaaagtttgtcaaagttaatgataaagataatcgtttagctggggcagaatttgtaattgcaaatgctgataatgctggtcaatatttagcacgtaaagcagataaagtgagtcaagaagagaagcagttggttgttacaacaaaggatgctttagatagagcagttgctgcttataacgctcttactgcacaacaacaaactcagcaagaaaaagagaaagttgacaaagctcaagctgcttataatgctgctgtgattgctgccaacaatgcatttgaatgggtggcagataaggacaatgaaaatgttgtgaaattagtttctgatgcacaaggtcgctttgaaattacaggccttcttgcaggtacatattacttagaagaaacaaaacagcctgctggttatgcattactaactagccgtcagaaatttgaagtcactgcaacttcttattcagcgactggacaaggcattgagtatactgctggttcaggtaaagatgacgctacaaaagtagtcaacaaaaaaatcactggatccggcagcggtggcggtggcgctgcaacagtttttgcggcggacaatgttagtacagcaccagatgctgttactaaaactttaacaatccataagttactgctctcagaagatgatttaaagacttgggatacaaacggtcctaaaggatatgatggaactcaatctagtttaaaagatttaactggagttgtagctgaggaaattccaaatgtatactttgaattacaaaagtataatttgactgatggtaaggaaaaagaaaatcttaaagatgatagtaaatggacaacagttcatggtggtttgacaactaaagatggacttaaaattgaaaccagtactcttaaaggtgtgtatcgtattcgtgaggatagaacaaagactacctatgttggtcctaatgggcaagtattaacaggttcaaaagccgtacctgctcttgtaactcttccacttgttaacaataatggtacagtaattgatgcacatgttttccctaaaaattcatataataaaccagttgtagataaaagaattgctgatactttgaattataacgatcaaaatggtctgtctatcggtactaaaatcccatatgttgttaatacaacaattccaagtaatgcaacatttgcaacttcattttggtcagatgaaatgacagaaggtctaacttataatgaagatgtaacaattactttgaataatgtagctatggatcaagctgattatgaagtcactaaaggaaataatggctttaacttaaaattaacagaagcaggtttagctaaaattaatggtaaggatgcagaccaaaaaatccaaattacttactcagctactttgaactcacttgctgttgcagacattcctgaaagtaacgatattacatatcattacggaaatcatcaagatcatgggaatactccaaaaccaactaaacctaataatggtcaaattacagtaactaagacatgggacagtcaacctgctcctgagggggtgaaagcgactgttcaacttgtaaatgccaagactggtgagaaagtcggtgctcctgtagaactttcagaaaataattggacatatacttggagtggtctagataattctattgaatacaaagttgaagaagaatataatggatactcagctgaatacacagtagagagcaaagggaagttgggggtaaaaaactggaaagataataacccagctccaatcaatcctgaagaaccacgtgtaaaaacatacggtaaaaagtttgtcaaagtagaccaaaaagatactcgtctagaaaatgcgcagttcgttgttaaaaaagcagatagcaataaatatattgcctttaagtcaactgcacaacaagctgcagatgaaaaagcagcagcaactgcaaaacaaaaattggatgcagcggtagcagcttacacaaatgctgcagataagcaagccgctcaagctctagtagatcaagcacagcaagaatacaatgtagcttacaaagaagccaaatttggttatgttgaagtagctggaaaagatgaagcaatggttcttacttctaatacggatggtcaattccaaatttcaggtcttgctgctggtacttataaattagaagaaattaaagctccagaaggttttgcgaaaattgatgatgtagaatttgttgttggagcaggttcttggaatcaaggtgagtttaattacttaaaagatgttcaaaagaatgacgctacaaaagtagtcaacaaaaaaatcactctcgagggcagcggtggcggtggcgcggaacaaaaaactaagacacttacagttcataaattattgatgacagatcaagagcttgacgcttggaattctgatgcgattactactgcaggttatgacggttcgcaaaattttgaacagttcaaacaacttcaaggtgttccacaaggagtaaccgaaatctctggtgttgcattcgagttacagagttatacgggtcctcaaggaaaagaacaagaaaatttaacgaatgatgcggtttggactgcggttaataaaggtgtgacgactgaaacgggtgttaaatttgatactgaagttttacaagggacatatcgtcttgtcgaagtacgtaaagaatcgacttatgtcggtccaaatggtaaagttttaacaggtatgaaagctgttcctgctttaattattctgccgcttgtaaaccaaaatggtgttgtagaaaatgcacatgtctatccaaagaattctgaagacaaacctacagcaacgaaaacatttgatactgcagcaggtttcgtagatccaggtgaaaaaggtttagcaattggcactaaggtaccgtatattgttacaacaactattccgaaaaactcaactcttgcaacagctttctggtcagatgaaatgacagaaggtctagattataatggtgatgtagttgttaattataatggtcaaccgcttgataattctcattacacattagaagcaggtcataatggctttatcttgaagttaaatgaaaaaggtctggaagcaatcaacggtaaagatgcagaagcaacaattacgttgaagtatactgcaactttaaatgctcttgctgttgctgatgtgccagaagcgaatgatgtaacattccattatggaaacaacccaggtcatggtaacactccaaaaccaaacaaacctaaaaacggtgaacttacaattactaaaacatgggctgatgctaaagatgctcctatagcaggtgtagaagtaacttttgatttggtaaatgctcagacaggtgaggtcgttaaagtacctggacatgaaacaggtattgtattgaatcaaacaaataattggacatttactgctacaggtcttgataataatacagaatataaatttgttgaacggacaattaagggatattctgcagattaccaaacaattactgaaacaggaaaaattgctgttaaaaactggaaagatgaaaatccagaaccaataaatcctgaagagccacgtgtaaaaacatatggtaaaaaattcgttaaggttgaccaaaaagacgaacgcttaaaagaagcacaattcgttgtgaagaatgagcaagggaaatatcttgcactcaaatctgcagcacaacaagctgtaaatgagaaagctgccgcagaagcgaaacaagcgctagatgcagcgatagcagcctatacaaatgctgcagataaaaatgcagcacaagctgtagtagatgctgcgcaaaaaacatataatgacaattacagagcagctagatttggctatgtagaagtagagagaaaagaagatgcgttagttcttacttctaacactgatggtcaattccaaatttcaggtcttgctgctggaagctacacgttggaagaaacaaaagctccagaaggctttgcaaaacttggagatgtgaagtttgaggttggagcaggttcttggaatcaaggtgatttcaattatttaaaagatgttcagaagaacgacgctacaaaagtagtcaacaaaaaaatcacgctcgagcaccaccaccaccaccac

SEQ ID NO: 248 - protein, 1801 aa, Artificial Sequence
  Description of Artificial Sequence: Synthetic RrgB I-III-II polypeptide
MASAATVFAAGTTTTSVTVHKLLATDGDMDKIANELETGNYAGNKVGVLPANAKEIAGVMFVWTNTNNEIIDENGQTLGVNIDPQTFKLSGAMPATAMKKLTEAEGAKFNTANLPAAKYKIYEIHSLSTYVGEDGATLTGSKAVPIEIELPLNDVVDAHVYPKNTEAKPKIDKDFKGKANPDTPRVDKDTPVNHQVGDVVEYEIVTKIPALANYATANWSDRMTEGLAFNKGTVKVTVDDVALEAGDYALTEVATGFDLKLTDAGLAKVNDQNAEKTVKITYSATLNDKAIVEVPESNDVTFNYGNNPDHGNTPKPNKPNENGDLTLTKTWVDATGAPIPAGAEATFDLVNAQTGKVVQTVTLTTDKNTVTVNGLDKNTEYKFVERSIKGYSADYQEITTAGEIAVKNWKDENPKPLDPTEPKVVTYGKKFVKVNDKDNRLAGAEFVIANADNAGQYLARKADKVSQEEKQLVVTTKDALDRAVAAYNALTAQQQTQQEKEKVDKAQAAYNAAVIAANNAFEWVADKDNENVVKLVSDAQGRFEITGLLAGTYYLEETKQPAGYALLTSRQKFEVTATSYSATGQGIEYTAGSGKDDATKVVNKKITGSGSGGGGAEQKTKTLTVHKLLMTDQELDAWNSDAITTAGYDGSQNFEQFKQLQGVPQGVTEISGVAFELQSYTGPQGKEQENLTNDAVWTAVNKGVTTETGVKFDTEVLQGTYRLVEVRKESTYVGPNGKVLTGMKAVPALIILPLVNQNGVVENAHVYPKNSEDKPTATKTFDTAAGFVDPGEKGLAIGTKVPYIVTTTIPKNSTLATAFWSDEMTEGLDYNGDVVVNYNGQPLDNSHYTLEAGHNGFILKLNEKGLEAINGKDAEATITLKYTATLNALAVADVPEANDVTFHYGNNPGHGNTPKPNKPKNGELTITKTWADAKDAPIAGVEVTFDLVNAQTGEVVKVPGHETGIVLNQTNNWTFTATGLDNNTEYKFVERTIKGYSADYQTITETGKIAVKNWKDENPEPINPEEPRVKTYGKKFVKVDQKDERLKEAQFVVKNEQGKYLALKSAAQQAVNEKAAAEAKQALDAAIAAYTNAADKNAAQAVVDAAQKTYNDNYRAARFGYVEVERKEDALVLTSNTDGQFQISGLAAGSYTLEETKAPEGFAKLGDVKFEVGAGSWNQGDFNYLKDVQKNDATKVVNKKITLGGSGGGGAATVFAADNVSTAPDAVTKTLTIHKLLLSEDDLKTWDTNGPKGYDGTQSSLKDLTGVVAEEIPNVYFELQKYNLTDGKEKENLKDDSKWTTVHGGLTTKDGLKIETSTLKGVYRIREDRTKTTYVGPNGQVLTGSKAVPALVTLPLVNNNGTVIDAHVFPKNSYNKPVVDKRIADTLNYNDQNGLSIGTKIPYVVNTTIPSNATFATSFWSDEMTEGLTYNEDVTITLNNVAMDQADYEVTKGNNGFNLKLTEAGLAKINGKDADQKIQITYSATLNSLAVADIPESNDITYHYGNHQDHGNTPKPTKPNNGQITVTKTWDSQPAPEGVKATVQLVNAKTGEKVGAPVELSENNWTYTWSGLDNSIEYKVEEEYNGYSAEYTVESKGKLGVKNWKDNNPAPINPEEPRVKTYGKKFVKVDQKDTRLENAQFVVKKADSNKYIAFKSTAQQAADEKAAATAKQKLDAAVAAYTNAADKQAAQALVDQAQQEYNVAYKEAKFGYVEVAGKDEAMVLTSNTDGQFQISGLAAGTYKLEEIKAPEGFAKIDDVEFVVGAGSWNQGEFNYLKDVQKNDATKVVNKKITLGHHHHHH

SEQ ID NO: 249 - DNA, 5403 bp, Artificial Sequence
  Description of Artificial Sequence: Synthetic polynucleotide
  Sequence encoding SEQ ID NO: 248
atggctagcgctgcaacagtttttgcggctgggacgacaacaacatctgttaccgttcataaactattggcaacagatggggatatggataaaattgcaaatgagttagaaacaggtaactatgctggtaataaagtgggtgttctacctgcaaatgcaaaagaaattgccggtgttatgttcgtttggacaaatactaataatgaaattattgatgaaaatggccaaactctaggagtgaatattgatccacaaacatttaaactctcaggggcaatgccggcaactgcaatgaaaaaattaacagaagctgaaggagctaaatttaacacggcaaatttaccagctgctaagtataaaatttatgaaattcacagtttatcaacttatgtcggtgaagatggagcaaccttaacaggttctaaagcagttccaattgaaattgaattaccattgaacgatgttgtggatgcgcatgtgtatccaaaaaatacagaagcaaagccaaaaattgataaagatttcaaaggtaaagcaaatccagatacaccacgtgtagataaagatacacctgtgaaccaccaagttggagatgttgtagagtacgaaattgttacaaaaattccagcacttgctaattatgcaacagcaaactggagcgatagaatgactgaaggtttggcattcaacaaaggtacagtgaaagtaactgttgatgatgttgcacttgaagcaggtgattatgctctaacagaagtagcaactggttttgatttgaaattaacagatgctggtttagctaaagtgaatgaccaaaacgctgaaaaaactgtgaaaatcacttattcggcaacattgaatgacaaagcaattgtagaagtaccagaatctaatgatgtaacatttaactatggtaataatccagatcacgggaatactccaaagccgaataagccaaatgaaaacggcgatttgacattgaccaagacatgggttgatgctacaggtgcaccaattccggctggagctgaagcaacgttcgatttggttaatgctcagactggtaaagttgtacaaactgtaactttgacaacagacaaaaatacagttactgttaacggattggataaaaatacagaatataaattcgttgaacgtagtataaaagggtattcagcagattatcaagaaatcactacagctggagaaattgctgtcaagaactggaaagacgaaaatccaaaaccacttgatccaacagagccaaaagttgttacatatggtaaaaagtttgtcaaagttaatgataaagataatcgtttagctggggcagaatttgtaattgcaaatgctgataatgctggtcaatatttagcacgtaaagcagataaagtgagtcaagaagagaagcagttggttgttacaacaaaggatgctttagatagagcagttgctgcttataacgctcttactgcacaacaacaaactcagcaagaaaaagagaaagttgacaaagctcaagctgcttataatgctgctgtgattgctgccaacaatgcatttgaatgggtggcagataaggacaatgaaaatgttgtgaaattagtttctgatgcacaaggtcgctttgaaattacaggccttcttgcaggtacatattacttagaagaaacaaaacagcctgctggttatgcattactaactagccgtcagaaatttgaagtcactgcaacttcttattcagcgactggacaaggcattgagtatactgctggttcaggtaaagatgacgctacaaaagtagtcaacaaaaaaatcactggatccggcagcggtggcggtggcgcggaacaaaaaactaagacacttacagttcataaattattgatgacagatcaagagcttgacgcttggaattctgatgcgattactactgcaggttatgacggttcgcaaaattttgaacagttcaaacaacttcaaggtgttccacaaggagtaaccgaaatctctggtgttgcattcgagttacagagttatacgggtcctcaaggaaaagaacaagaaaatttaacgaatgatgcggtttggactgcggttaataaaggtgtgacgactgaaacgggtgttaaatttgatactgaagttttacaagggacatatcgtcttgtcgaagtacgtaaagaatcgacttatgtcggtccaaatggtaaagttttaacaggtatgaaagctgttcctgctttaattattctgccgcttgtaaaccaaaatggtgttgtagaaaatgcacatgtctatccaaagaattctgaagacaaacctacagcaacgaaaacatttgatactgcagcaggtttcgtagatccaggtgaaaaaggtttagcaattggcactaaggtaccgtatattgttacaacaactattccgaaaaactcaactcttgcaacagctttctggtcagatgaaatgacagaaggtctagattataatggtgatgtagttgttaattataatggtcaaccgcttgataattctcattacacattagaagcaggtcataatggctttatcttgaagttaaatgaaaaaggtctggaagcaatcaacggtaaagatgcagaagcaacaattacgttgaagtatactgcaactttaaatgctcttgctgttgctgatgtgccagaagcgaatgatgtaacattccattatggaaacaacccaggtcatggtaacactccaaaaccaaacaaacctaaaaacggtgaacttacaattactaaaacatgggctgatgctaaagatgctcctatagcaggtgtagaagtaacttttgatttggtaaatgctcagacaggtgaggtcgttaaagtacctggacatgaaacaggtattgtattgaatcaaacaaataattggacatttactgctacaggtcttgataataatacagaatataaatttgttgaacggacaattaagggatattctgcagattaccaaacaattactgaaacaggaaaaattgctgttaaaaactggaaagatgaaaatccagaaccaataaatcctgaagagccacgtgtaaaaacatatggtaaaaaattcgttaaggttgaccaaaaagacgaacgcttaaaagaagcacaattcgttgtgaagaatgagcaagggaaatatcttgcactcaaatctgcagcacaacaagctgtaaatgagaaagctgccgcagaagcgaaacaagcgctagatgcagcgatagcagcctatacaaatgctgcagataaaaatgcagcacaagctgtagtagatgctgcgcaaaaaacatataatgacaattacagagcagctagatttggctatgtagaagtagagagaaaagaagatgcgttagttcttacttctaacactgatggtcaattccaaatttcaggtcttgctgctggaagctacacgttggaagaaacaaaagctccagaaggctttgcaaaacttggagatgtgaagtttgaggttggagcaggttcttggaatcaaggtgatttcaattatttaaaagatgttcagaagaacgacgctacaaaagtagtcaacaaaaaaatcacgctcgagggcagcggtggcggtggcgctgcaacagtttttgcggcggacaatgttagtacagcaccagatgctgttactaaaactttaacaatccataagttactgctctcagaagatgatttaaagacttgggatacaaacggtcctaaaggatatgatggaactcaatctagtttaaaagatttaactggagttgtagctgaggaaattccaaatgtatactttgaattacaaaagtataatttgactgatggtaaggaaaaagaaaatcttaaagatgatagtaaatggacaacagttcatggtggtttgacaactaaagatggacttaaaattgaaaccagtactcttaaaggtgtgtatcgtattcgtgaggatagaacaaagactacctatgttggtcctaatgggcaagtattaacaggttcaaaagccgtacctgctcttgtaactcttccacttgttaacaataatggtacagtaattgatgcacatgttttccctaaaaattcatataataaaccagttgtagataaaagaattgctgatactttgaattataacgatcaaaatggtctgtctatcggtactaaaatcccatatgttgttaatacaacaattccaagtaatgcaacatttgcaacttcattttggtcagatgaaatgacagaaggtctaacttataatgaagatgtaacaattactttgaataatgtagctatggatcaagctgattatgaagtcactaaaggaaataatggctttaacttaaaattaacagaagcaggtttagctaaaattaatggtaaggatgcagaccaaaaaatccaaattacttactcagctactttgaactcacttgctgttgcagacattcctgaaagtaacgatattacatatcattacggaaatcatcaagatcatgggaatactccaaaaccaactaaacctaataatggtcaaattacagtaactaagacatgggacagtcaacctgctcctgagggggtgaaagcgactgttcaacttgtaaatgccaagactggtgagaaagtcggtgctcctgtagaactttcagaaaataattggacatatacttggagtggtctagataattctattgaatacaaagttgaagaagaatataatggatactcagctgaatacacagtagagagcaaagggaagttgggggtaaaaaactggaaagataataacccagctccaatcaatcctgaagaaccacgtgtaaaaacatacggtaaaaagtttgtcaaagtagaccaaaaagatactcgtctagaaaatgcgcagttcgttgttaaaaaagcagatagcaataaatatattgcctttaagtcaactgcacaacaagctgcagatgaaaaagcagcagcaactgcaaaacaaaaattggatgcagcggtagcagcttacacaaatgctgcagataagcaagccgctcaagctctagtagatcaagcacagcaagaatacaatgtagcttacaaagaagccaaatttggttatgttgaagtagctggaaaagatgaagcaatggttcttacttctaatacggatggtcaattccaaatttcaggtcttgctgctggtacttataaattagaagaaattaaagctccagaaggttttgcgaaaattgatgatgtagaatttgttgttggagcaggttcttggaatcaaggtgagtttaattacttaaaagatgttcaaaagaatgacgctacaaaagtagtcaacaaaaaaatcactctcgagcaccaccaccaccaccac

SEQ ID NO: 250 - protein, 1801 aa, Artificial Sequence
  Description of Artificial Sequence: Synthetic RrgB III-II-I polypeptide
MASAEQKTKTLTVHKLLMTDQELDAWNSDAITTAGYDGSQNFEQFKQLQGVPQGVTEISGVAFELQSYTGPQGKEQENLTNDAVWTAVNKGVTTETGVKFDTEVLQGTYRLVEVRKESTYVGPNGKVLTGMKAVPALIILPLVNQNGVVENAHVYPKNSEDKPTATKTFDTAAGFVDPGEKGLAIGTKVPYIVTTTIPKNSTLATAFWSDEMTEGLDYNGDVVVNYNGQPLDNSHYTLEAGHNGFILKLNEKGLEAINGKDAEATITLKYTATLNALAVADVPEANDVTFHYGNNPGHGNTPKPNKPKNGELTITKTWADAKDAPIAGVEVTFDLVNAQTGEVVKVPGHETGIVLNQTNNWTFTATGLDNNTEYKFVERTIKGYSADYQTITETGKIAVKNWKDENPEPINPEEPRVKTYGKKFVKVDQKDERLKEAQFVVKNEQGKYLALKSAAQQAVNEKAAAEAKQALDAAIAAYTNAADKNAAQAVVDAAQKTYNDNYRAARFGYVEVERKEDALVLTSNTDGQFQISGLAAGSYTLEETKAPEGFAKLGDVKFEVGAGSWNQGDFNYLKDVQKNDATKVVNKKITGSGSGGGGAATVFAADNVSTAPDAVTKTLTIHKLLLSEDDLKTWDTNGPKGYDGTQSSLKDLTGVVAEEIPNVYFELQKYNLTDGKEKENLKDDSKWTTVHGGLTTKDGLKIETSTLKGVYRIREDRTKTTYVGPNGQVLTGSKAVPALVTLPLVNNNGTVIDAHVFPKNSYNKPVVDKRIADTLNYNDQNGLSIGTKIPYVVNTTIPSNATFATSFWSDEMTEGLTYNEDVTITLNNVAMDQADYEVTKGNNGFNLKLTEAGLAKINGKDADQKIQITYSATLNSLAVADIPESNDITYHYGNHQDHGNTPKPTKPNNGQITVTKTWDSQPAPEGVKATVQLVNAKTGEKVGAPVELSENNWTYTWSGLDNSIEYKVEEEYNGYSAEYTVESKGKLGVKNWKDNNPAPINPEEPRVKTYGKKFVKVDQKDTRLENAQFVVKKADSNKYIAFKSTAQQAADEKAAATAKQKLDAAVAAYTNAADKQAAQALVDQAQQEYNVAYKEAKFGYVEVAGKDEAMVLTSNTDGQFQISGLAAGTYKLEEIKAPEGFAKIDDVEFVVGAGSWNQGEFNYLKDVQKNDATKVVNKKITLGGSGGGGAATVFAAGTTTTSVTVHKLLATDGDMDKIANELETGNYAGNKVGVLPANAKEIAGVMFVWTNTNNEIIDENGQTLGVNIDPQTFKLSGAMPATAMKKLTEAEGAKFNTANLPAAKYKIYEIHSLSTYVGEDGATLTGSKAVPIEIELPLNDVVDAHVYPKNTEAKPKIDKDFKGKANPDTPRVDKDTPVNHQVGDVVEYEIVTKIPALANYATANWSDRMTEGLAFNKGTVKVTVDDVALEAGDYALTEVATGFDLKLTDAGLAKVNDQNAEKTVKITYSATLNDKAIVEVPESNDVTFNYGNNPDHGNTPKPNKPNENGDLTLTKTWVDATGAPIPAGAEATFDLVNAQTGKVVQTVTLTTDKNTVTVNGLDKNTEYKFVERSIKGYSADYQEITTAGEIAVKNWKDENPKPLDPTEPKVVTYGKKFVKVNDKDNRLAGAEFVIANADNAGQYLARKADKVSQEEKQLVVTTKDALDRAVAAYNALTAQQQTQQEKEKVDKAQAAYNAAVIAANNAFEWVADKDNENVVKLVSDAQGRFEITGLLAGTYYLEETKQPAGYALLTSRQKFEVTATSYSATGQGIEYTAGSGKDDATKVVNKKITLGHHHHHH

SEQ ID NO: 251 - DNA, 5403 bp, Artificial Sequence
  Description of Artificial Sequence: Synthetic polynucleotide
  Sequence encoding SEQ ID NO: 250
atggctagcgcggaacaaaaaactaagacacttacagttcataaattattgatgacagatcaagagcttgacgcttggaattctgatgcgattactactgcaggttatgacggttcgcaaaattttgaacagttcaaacaacttcaaggtgttccacaaggagtaaccgaaatctctggtgttgcattcgagttacagagttatacgggtcctcaaggaaaagaacaagaaaatttaacgaatgatgcggtttggactgcggttaataaaggtgtgacgactgaaacgggtgttaaatttgatactgaagttttacaagggacatatcgtcttgtcgaagtacgtaaagaatcgacttatgtcggtccaaatggtaaagttttaacaggtatgaaagctgttcctgctttaattattctgccgcttgtaaaccaaaatggtgttgtagaaaatgcacatgtctatccaaagaattctgaagacaaacctacagcaacgaaaacatttgatactgcagcaggtttcgtagatccaggtgaaaaaggtttagcaattggcactaaggtaccgtatattgttacaacaactattccgaaaaactcaactcttgcaacagctttctggtcagatgaaatgacagaaggtctagattataatggtgatgtagttgttaattataatggtcaaccgcttgataattctcattacacattagaagcaggtcataatggctttatcttgaagttaaatgaaaaaggtctggaagcaatcaacggtaaagatgcagaagcaacaattacgttgaagtatactgcaactttaaatgctcttgctgttgctgatgtgccagaagcgaatgatgtaacattccattatggaaacaacccaggtcatggtaacactccaaaaccaaacaaacctaaaaacggtgaacttacaattactaaaacatgggctgatgctaaagatgctcctatagcaggtgtagaagtaacttttgatttggtaaatgctcagacaggtgaggtcgttaaagtacctggacatgaaacaggtattgtattgaatcaaacaaataattggacatttactgctacaggtcttgataataatacagaatataaatttgttgaacggacaattaagggatattctgcagattaccaaacaattactgaaacaggaaaaattgctgttaaaaactggaaagatgaaaatccagaaccaataaatcctgaagagccacgtgtaaaaacatatggtaaaaaattcgttaaggttgaccaaaaagacgaacgcttaaaagaagcacaattcgttgtgaagaatgagcaagggaaatatcttgcactcaaatctgcagcacaacaagctgtaaatgagaaagctgccgcagaagcgaaacaagcgctagatgcagcgatagcagcctatacaaatgctgcagataaaaatgcagcacaagctgtagtagatgctgcgcaaaaaacatataatgacaattacagagcagctagatttggctatgtagaagtagagagaaaagaagatgcgttagttcttacttctaacactgatggtcaattccaaatttcaggtcttgctgctggaagctacacgttggaagaaacaaaagctccagaaggctttgcaaaacttggagatgtgaagtttgaggttggagcaggttcttggaatcaaggtgatttcaattatttaaaagatgttcagaagaacgacgctacaaaagtagtcaacaaaaaaatcacgggatccggcagcggtggcggtggcgctgcaacagtttttgcggcggacaatgttagtacagcaccagatgctgttactaaaactttaacaatccataagttactgctctcagaagatgatttaaagacttgggatacaaacggtcctaaaggatatgatggaactcaatctagtttaaaagatttaactggagttgtagctgaggaaattccaaatgtatactttgaattacaaaagtataatttgactgatggtaaggaaaaagaaaatcttaaagatgatagtaaatggacaacagttcatggtggtttgacaactaaagatggacttaaaattgaaaccagtactcttaaaggtgtgtatcgtattcgtgaggatagaacaaagactacctatgttggtcctaatgggcaagtattaacaggttcaaaagccgtacctgctcttgtaactcttccacttgttaacaataatggtacagtaattgatgcacatgttttccctaaaaattcatataataaaccagttgtagataaaagaattgctgatactttgaattataacgatcaaaatggtctgtctatcggtactaaaatcccatatgttgttaatacaacaattccaagtaatgcaacatttgcaacttcattttggtcagatgaaatgacagaaggtctaacttataatgaagatgtaacaattactttgaataatgtagctatggatcaagctgattatgaagtcactaaaggaaataatggctttaacttaaaattaacagaagcaggtttagctaaaattaatggtaaggatgcagaccaaaaaatccaaattacttactcagctactttgaactcacttgctgttgcagacattcctgaaagtaacgatattacatatcattacggaaatcatcaagatcatgggaatactccaaaaccaactaaacctaataatggtcaaattacagtaactaagacatgggacagtcaacctgctcctgagggggtgaaagcgactgttcaacttgtaaatgccaagactggtgagaaagtcggtgctcctgtagaactttcagaaaataattggacatatacttggagtggtctagataattctattgaatacaaagttgaagaagaatataatggatactcagctgaatacacagtagagagcaaagggaagttgggggtaaaaaactggaaagataataacccagctccaatcaatcctgaagaaccacgtgtaaaaacatacggtaaaaagtttgtcaaagtagaccaaaaagatactcgtctagaaaatgcgcagttcgttgttaaaaaagcagatagcaataaatatattgcctttaagtcaactgcacaacaagctgcagatgaaaaagcagcagcaactgcaaaacaaaaattggatgcagcggtagcagcttacacaaatgctgcagataagcaagccgctcaagctctagtagatcaagcacagcaagaatacaatgtagcttacaaagaagccaaatttggttatgttgaagtagctggaaaagatgaagcaatggttcttacttctaatacggatggtcaattccaaatttcaggtcttgctgctggtacttataaattagaagaaattaaagctccagaaggttttgcgaaaattgatgatgtagaatttgttgttggagcaggttcttggaatcaaggtgagtttaattacttaaaagatgttcaaaagaatgacgctacaaaagtagtcaacaaaaaaatcactctcgagggcagcggtggcggtggcgctgcaacagtttttgcggctgggacgacaacaacatctgttaccgttcataaactattggcaacagatggggatatggataaaattgcaaatgagttagaaacaggtaactatgctggtaataaagtgggtgttctacctgcaaatgcaaaagaaattgccggtgttatgttcgtttggacaaatactaataatgaaattattgatgaaaatggccaaactctaggagtgaatattgatccacaaacatttaaactctcaggggcaatgccggcaactgcaatgaaaaaattaacagaagctgaaggagctaaatttaacacggcaaatttaccagctgctaagtataaaatttatgaaattcacagtttatcaacttatgtcggtgaagatggagcaaccttaacaggttctaaagcagttccaattgaaattgaattaccattgaacgatgttgtggatgcgcatgtgtatccaaaaaatacagaagcaaagccaaaaattgataaagatttcaaaggtaaagcaaatccagatacaccacgtgtagataaagatacacctgtgaaccaccaagttggagatgttgtagagtacgaaattgttacaaaaattccagcacttgctaattatgcaacagcaaactggagcgatagaatgactgaaggtttggcattcaacaaaggtacagtgaaagtaactgttgatgatgttgcacttgaagcaggtgattatgctctaacagaagtagcaactggttttgatttgaaattaacagatgctggtttagctaaagtgaatgaccaaaacgctgaaaaaactgtgaaaatcacttattcggcaacattgaatgacaaagcaattgtagaagtaccagaatctaatgatgtaacatttaactatggtaataatccagatcacgggaatactccaaagccgaataagccaaatgaaaacggcgatttgacattgaccaagacatgggttgatgctacaggtgcaccaattccggctggagctgaagcaacgttcgatttggttaatgctcagactggtaaagttgtacaaactgtaactttgacaacagacaaaaatacagttactgttaacggattggataaaaatacagaatataaattcgttgaacgtagtataaaagggtattcagcagattatcaagaaatcactacagctggagaaattgctgtcaagaactggaaagacgaaaatccaaaaccacttgatccaacagagccaaaagttgttacatatggtaaaaagtttgtcaaagttaatgataaagataatcgtttagctggggcagaatttgtaattgcaaatgctgataatgctggtcaatatttagcacgtaaagcagataaagtgagtcaagaagagaagcagttggttgttacaacaaaggatgctttagatagagcagttgctgcttataacgctcttactgcacaacaacaaactcagcaagaaaaagagaaagttgacaaagctcaagctgcttataatgctgctgtgattgctgccaacaatgcatttgaatgggtggcagataaggacaatgaaaatgttgtgaaattagtttctgatgcacaaggtcgctttgaaattacaggccttcttgcaggtacatattacttagaagaaacaaaacagcctgctggttatgcattactaactagccgtcagaaatttgaagtcactgcaacttcttattcagcgactggacaaggcattgagtatactgctggttcaggtaaagatgacgctacaaaagtagtcaacaaaaaaatcactctcgagcaccaccaccaccaccac

SEQ ID NO: 252 - protein, 1801 aa, Artificial Sequence
  Description of Artificial Sequence: Synthetic RrgB III-I-II polypeptide
MASAEQKTKTLTVHKLLMTDQELDAWNSDAITTAGYDGSQNFEQFKQLQGVPQGVTEISGVAFELQSYTGPQGKEQENLTNDAVWTAVNKGVTTETGVKFDTEVLQGTYRLVEVRKESTYVGPNGKVLTGMKAVPALIILPLVNQNGVVENAHVYPKNSEDKPTATKTFDTAAGFVDPGEKGLAIGTKVPYIVTTTIPKNSTLATAFWSDEMTEGLDYNGDVVVNYNGQPLDNSHYTLEAGHNGFILKLNEKGLEAINGKDAEATITLKYTATLNALAVADVPEANDVTFHYGNNPGHGNTPKPNKPKNGELTITKTWADAKDAPIAGVEVTFDLVNAQTGEVVKVPGHETGIVLNQTNNWTFTATGLDNNTEYKFVERTIKGYSADYQTITETGKIAVKNWKDENPEPINPEEPRVKTYGKKFVKVDQKDERLKEAQFVVKNEQGKYLALKSAAQQAVNEKAAAEAKQALDAAIAAYTNAADKNAAQAVVDAAQKTYNDNYRAARFGYVEVERKEDALVLTSNTDGQFQISGLAAGSYTLEETKAPEGFAKLGDVKFEVGAGSWNQGDFNYLKDVQKNDATKVVNKKITGSGSGGGGAATVFAAGTTTTSVTVHKLLATDGDMDKIANELETGNYAGNKVGVLPANAKEIAGVMFVWTNTNNEIIDENGQTLGVNIDPQTFKLSGAMPATAMKKLTEAEGAKFNTANLPAAKYKIYEIHSLSTYVGEDGATLTGSKAVPIEIELPLNDVVDAHVYPKNTEAKPKIDKDFKGKANPDTPRVDKDTPVNHQVGDVVEYEIVTKIPALANYATANWSDRMTEGLAFNKGTVKVTVDDVALEAGDYALTEVATGFDLKLTDAGLAKVNDQNAEKTVKITYSATLNDKAIVEVPESNDVTFNYGNNPDHGNTPKPNKPNENGDLTLTKTWVDATGAPIPAGAEATFDLVNAQTGKVVQTVTLTTDKNTVTVNGLDKNTEYKFVERSIKGYSADYQEITTAGEIAVKNWKDENPKPLDPTEPKVVTYGKKFVKVNDKDNRLAGAEFVIANADNAGQYLARKADKVSQEEKQLVVTTKDALDRAVAAYNALTAQQQTQQEKEKVDKAQAAYNAAVIAANNAFEWVADKDNENVVKLVSDAQGRFEITGLLAGTYYLEETKQPAGYALLTSRQKFEVTATSYSATGQGIEYTAGSGKDDATKVVNKKITLGGSGGGGAATVFAADNVSTAPDAVTKTLTIHKLLLSEDDLKTWDTNGPKGYDGTQSSLKDLTGVVAEEIPNVYFELQKYNLTDGKEKENLKDDSKWTTVHGGLTTKDGLKIETSTLKGVYRIREDRTKTTYVGPNGQVLTGSKAVPALVTLPLVNNNGTVIDAHVFPKNSYNKPVVDKRIADTLNYNDQNGLSIGTKIPYVVNTTIPSNATFATSFWSDEMTEGLTYNEDVTITLNNVAMDQADYEVTKGNNGFNLKLTEAGLAKINGKDADQKIQITYSATLNSLAVADIPESNDITYHYGNHQDHGNTPKPTKPNNGQITVTKTWDSQPAPEGVKATVQLVNAKTGEKVGAPVELSENNWTYTWSGLDNSIEYKVEEEYNGYSAEYTVESKGKLGVKNWKDNNPAPINPEEPRVKTYGKKFVKVDQKDTRLENAQFVVKKADSNKYIAFKSTAQQAADEKAAATAKQKLDAAVAAYTNAADKQAAQALVDQAQQEYNVAYKEAKFGYVEVAGKDEAMVLTSNTDGQFQISGLAAGTYKLEEIKAPEGFAKIDDVEFVVGAGSWNQGEFNYLKDVQKNDATKVVNKKITLGHHHHHH

SEQ ID NO: 253 - DNA, 5403 bp, Artificial Sequence
  Description of Artificial Sequence: Synthetic polynucleotide
  Sequence encoding SEQ ID NO: 252
atggctagcgcggaacaaaaaactaagacacttacagttcataaattattgatgacagatcaagagcttgacgcttggaattctgatgcgattactactgcaggttatgacggttcgcaaaattttgaacagttcaaacaacttcaaggtgttccacaaggagtaaccgaaatctctggtgttgcattcgagttacagagttatacgggtcctcaaggaaaagaacaagaaaatttaacgaatgatgcggtttggactgcggttaataaaggtgtgacgactgaaacgggtgttaaatttgatactgaagttttacaagggacatatcgtcttgtcgaagtacgtaaagaatcgacttatgtcggtccaaatggtaaagttttaacaggtatgaaagctgttcctgctttaattattctgccgcttgtaaaccaaaatggtgttgtagaaaatgcacatgtctatccaaagaattctgaagacaaacctacagcaacgaaaacatttgatactgcagcaggtttcgtagatccaggtgaaaaaggtttagcaattggcactaaggtaccgtatattgttacaacaactattccgaaaaactcaactcttgcaacagctttctggtcagatgaaatgacagaaggtctagattataatggtgatgtagttgttaattataatggtcaaccgcttgataattctcattacacattagaagcaggtcataatggctttatcttgaagttaaatgaaaaaggtctggaagcaatcaacggtaaagatgcagaagcaacaattacgttgaagtatactgcaactttaaatgctcttgctgttgctgatgtgccagaagcgaatgatgtaacattccattatggaaacaacccaggtcatggtaacactccaaaaccaaacaaacctaaaaacggtgaacttacaattactaaaacatgggctgatgctaaagatgctcctatagcaggtgtagaagtaacttttgatttggtaaatgctcagacaggtgaggtcgttaaagtacctggacatgaaacaggtattgtattgaatcaaacaaataattggacatttactgctacaggtcttgataataatacagaatataaatttgttgaacggacaattaagggatattctgcagattaccaaacaattactgaaacaggaaaaattgctgttaaaaactggaaagatgaaaatccagaaccaataaatcctgaagagccacgtgtaaaaacatatggtaaaaaattcgttaaggttgaccaaaaagacgaacgcttaaaagaagcacaattcgttgtgaagaatgagcaagggaaatatcttgcactcaaatctgcagcacaacaagctgtaaatgagaaagctgccgcagaagcgaaacaagcgctagatgcagcgatagcagcctatacaaatgctgcagataaaaatgcagcacaagctgtagtagatgctgcgcaaaaaacatataatgacaattacagagcagctagatttggctatgtagaagtagagagaaaagaagatgcgttagttcttacttctaacactgatggtcaattccaaatttcaggtcttgctgctggaagctacacgttggaagaaacaaaagctccagaaggctttgcaaaacttggagatgtgaagtttgaggttggagcaggttcttggaatcaaggtgatttcaattatttaaaagatgttcagaagaacgacgctacaaaagtagtcaacaaaaaaatcacgggatccggcagcggtggcggtggcgctgcaacagtttttgcggctgggacgacaacaacatctgttaccgttcataaactattggcaacagatggggatatggataaaattgcaaatgagttagaaacaggtaactatgctggtaataaagtgggtgttctacctgcaaatgcaaaagaaattgccggtgttatgttcgtttggacaaatactaataatgaaattattgatgaaaatggccaaactctaggagtgaatattgatccacaaacatttaaactctcaggggcaatgccggcaactgcaatgaaaaaattaacagaagctgaaggagctaaatttaacacggcaaatttaccagctgctaagtataaaatttatgaaattcacagtttatcaacttatgtcggtgaagatggagcaaccttaacaggttctaaagcagttccaattgaaattgaattaccattgaacgatgttgtggatgcgcatgtgtatccaaaaaatacagaagcaaagccaaaaattgataaagatttcaaaggtaaagcaaatccagatacaccacgtgtagataaagatacacctgtgaaccaccaagttggagatgttgtagagtacgaaattgttacaaaaattccagcacttgctaattatgcaacagcaaactggagcgatagaatgactgaaggtttggcattcaacaaaggtacagtgaaagtaactgttgatgatgttgcacttgaagcaggtgattatgctctaacagaagtagcaactggttttgatttgaaattaacagatgctggtttagctaaagtgaatgaccaaaacgctgaaaaaactgtgaaaatcacttattcggcaacattgaatgacaaagcaattgtagaagtaccagaatctaatgatgtaacatttaactatggtaataatccagatcacgggaatactccaaagccgaataagccaaatgaaaacggcgatttgacattgaccaagacatgggttgatgctacaggtgcaccaattccggctggagctgaagcaacgttcgatttggttaatgctcagactggtaaagttgtacaaactgtaactttgacaacagacaaaaatacagttactgttaacggattggataaaaatacagaatataaattcgttgaacgtagtataaaagggtattcagcagattatcaagaaatcactacagctggagaaattgctgtcaagaactggaaagacgaaaatccaaaaccacttgatccaacagagccaaaagttgttacatatggtaaaaagtttgtcaaagttaatgataaagataatcgtttagctggggcagaatttgtaattgcaaatgctgataatgctggtcaatatttagcacgtaaagcagataaagtgagtcaagaagagaagcagttggttgttacaacaaaggatgctttagatagagcagttgctgcttataacgctcttactgcacaacaacaaactcagcaagaaaaagagaaagttgacaaagctcaagctgcttataatgctgctgtgattgctgccaacaatgcatttgaatgggtggcagataaggacaatgaaaatgttgtgaaattagtttctgatgcacaaggtcgctttgaaattacaggccttcttgcaggtacatattacttagaagaaacaaaacagcctgctggttatgcattactaactagccgtcagaaatttgaagtcactgcaacttcttattcagcgactggacaaggcattgagtatactgctggttcaggtaaagatgacgctacaaaagtagtcaacaaaaaaatcactctcgagggcagcggtggcggtggcgctgcaacagtttttgcggcggacaatgttagtacagcaccagatgctgttactaaaactttaacaatccataagttactgctctcagaagatgatttaaagacttgggatacaaacggtcctaaaggatatgatggaactcaatctagtttaaaagatttaactggagttgtagctgaggaaattccaaatgtatactttgaattacaaaagtataatttgactgatggtaaggaaaaagaaaatcttaaagatgatagtaaatggacaacagttcatggtggtttgacaactaaagatggacttaaaattgaaaccagtactcttaaaggtgtgtatcgtattcgtgaggatagaacaaagactacctatgttggtcctaatgggcaagtattaacaggttcaaaagccgtacctgctcttgtaactcttccacttgttaacaataatggtacagtaattgatgcacatgttttccctaaaaattcatataataaaccagttgtagataaaagaattgctgatactttgaattataacgatcaaaatggtctgtctatcggtactaaaatcccatatgttgttaatacaacaattccaagtaatgcaacatttgcaacttcattttggtcagatgaaatgacagaaggtctaacttataatgaagatgtaacaattactttgaataatgtagctatggatcaagctgattatgaagtcactaaaggaaataatggctttaacttaaaattaacagaagcaggtttagctaaaattaatggtaaggatgcagaccaaaaaatccaaattacttactcagctactttgaactcacttgctgttgcagacattcctgaaagtaacgatattacatatcattacggaaatcatcaagatcatgggaatactccaaaaccaactaaacctaataatggtcaaattacagtaactaagacatgggacagtcaacctgctcctgagggggtgaaagcgactgttcaacttgtaaatgccaagactggtgagaaagtcggtgctcctgtagaactttcagaaaataattggacatatacttggagtggtctagataattctattgaatacaaagttgaagaagaatataatggatactcagctgaatacacagtagagagcaaagggaagttgggggtaaaaaactggaaagataataacccagctccaatcaatcctgaagaaccacgtgtaaaaacatacggtaaaaagtttgtcaaagtagaccaaaaagatactcgtctagaaaatgcgcagttcgttgttaaaaaagcagatagcaataaatatattgcctttaagtcaactgcacaacaagctgcagatgaaaaagcagcagcaactgcaaaacaaaaattggatgcagcggtagcagcttacacaaatgctgcagataagcaagccgctcaagctctagtagatcaagcacagcaagaatacaatgtagcttacaaagaagccaaatttggttatgttgaagtagctggaaaagatgaagcaatggttcttacttctaatacggatggtcaattccaaatttcaggtcttgctgctggtacttataaattagaagaaattaaagctccagaaggttttgcgaaaattgatgatgtagaatttgttgttggagcaggttcttggaatcaaggtgagtttaattacttaaaagatgttcaaaagaatgacgctacaaaagtagtcaacaaaaaaatcactctcgagcaccaccaccaccaccac

SEQ ID NO: 254 - protein, 1801 aa, Artificial Sequence
  Description of Artificial Sequence: Synthetic RrgB II-III-I polypeptide
MASAATVFAADNVSTAPDAVTKTLTIHKLLLSEDDLKTWDTNGPKGYDGTQSSLKDLTGVVAEEIPNVYFELQKYNLTDGKEKENLKDDSKWTTVHGGLTTKDGLKIETSTLKGVYRIREDRTKTTYVGPNGQVLTGSKAVPALVTLPLVNNNGTVIDAHVFPKNSYNKPVVDKRIADTLNYNDQNGLSIGTKIPYVVNTTIPSNATFATSFWSDEMTEGLTYNEDVTITLNNVAMDQADYEVTKGNNGFNLKLTEAGLAKINGKDADQKIQITYSATLNSLAVADIPESNDITYHYGNHQDHGNTPKPTKPNNGQITVTKTWDSQPAPEGVKATVQLVNAKTGEKVGAPVELSENNWTYTWSGLDNSIEYKVEEEYNGYSAEYTVESKGKLGVKNWKDNNPAPINPEEPRVKTYGKKFVKVDQKDTRLENAQFVVKKADSNKYIAFKSTAQQAADEKAAATAKQKLDAAVAAYTNAADKQAAQALVDQAQQEYNVAYKEAKFGYVEVAGKDEAMVLTSNTDGQFQISGLAAGTYKLEEIKAPEGFAKIDDVEFVVGAGSWNQGEFNYLKDVQKNDATKVVNKKITGSGSGGGGAEQKTKTLTVHKLLMTDQELDAWNSDAITTAGYDGSQNFEQFKQLQGVPQGVTEISGVAFELQSYTGPQGKEQENLTNDAVWTAVNKGVTTETGVKFDTEVLQGTYRLVEVRKESTYVGPNGKVLTGMKAVPALIILPLVNQNGVVENAHVYPKNSEDKPTATKTFDTAAGFVDPGEKGLAIGTKVPYIVTTTIPKNSTLATAFWSDEMTEGLDYNGDVVVNYNGQPLDNSHYTLEAGHNGFILKLNEKGLEAINGKDAEATITLKYTATLNALAVADVPEANDVTFHYGNNPGHGNTPKPNKPKNGELTITKTWADAKDAPIAGVEVTFDLVNAQTGEVVKVPGHETGIVLNQTNNWTFTATGLDNNTEYKFVERTIKGYSADYQTITETGKIAVKNWKDENPEPINPEEPRVKTYGKKFVKVDQKDERLKEAQFVVKNEQGKYLALKSAAQQAVNEKAAAEAKQALDAAIAAYTNAADKNAAQAVVDAAQKTYNDNYRAARFGYVEVERKEDALVLTSNTDGQFQISGLAAGSYTLEETKAPEGFAKLGDVKFEVGAGSWNQGDFNYLKDVQKNDATKVVNKKITLGGSGGGGAATVFAAGTTTTSVTVHKLLATDGDMDKIANELETGNYAGNKVGVLPANAKEIAGVMFVWTNTNNEIIDENGQTLGVNIDPQTFKLSGAMPATAMKKLTEAEGAKFNTANLPAAKYKIYEIHSLSTYVGEDGATLTGSKAVPIEIELPLNDVVDAHVYPKNTEAKPKIDKDFKGKANPDTPRVDKDTPVNHQVGDVVEYEIVTKIPALANYATANWSDRMTEGLAFNKGTVKVTVDDVALEAGDYALTEVATGFDLKLTDAGLAKVNDQNAEKTVKITYSATLNDKAIVEVPESNDVTFNYGNNPDHGNTPKPNKPNENGDLTLTKTWVDATGAPIPAGAEATFDLVNAQTGKVVQTVTLTTDKNTVTVNGLDKNTEYKFVERSIKGYSADYQEITTAGEIAVKNWKDENPKPLDPTEPKVVTYGKKFVKVNDKDNRLAGAEFVIANADNAGQYLARKADKVSQEEKQLVVTTKDALDRAVAAYNALTAQQQTQQEKEKVDKAQAAYNAAVIAANNAFEWVADKDNENVVKLVSDAQGRFEITGLLAGTYYLEETKQPAGYALLTSRQKFEVTATSYSATGQGIEYTAGSGKDDATKVVNKKITLGHHHHHH

SEQ ID NO: 255 - DNA, 5403 bp, Artificial Sequence
  Description of Artificial Sequence: Synthetic polynucleotide
  Sequence encoding SEQ ID NO: 254
atggctagcgctgcaacagtttttgcggcggacaatgttagtacagcaccagatgctgttactaaaactttaacaatccataagttactgctctcagaagatgatttaaagacttgggatacaaacggtcctaaaggatatgatggaactcaatctagtttaaaagatttaactggagttgtagctgaggaaattccaaatgtatactttgaattacaaaagtataatttgactgatggtaaggaaaaagaaaatcttaaagatgatagtaaatggacaacagttcatggtggtttgacaactaaagatggacttaaaattgaaaccagtactcttaaaggtgtgtatcgtattcgtgaggatagaacaaagactacctatgttggtcctaatgggcaagtattaacaggttcaaaagccgtacctgctcttgtaactcttccacttgttaacaataatggtacagtaattgatgcacatgttttccctaaaaattcatataataaaccagttgtagataaaagaattgctgatactttgaattataacgatcaaaatggtctgtctatcggtactaaaatcccatatgttgttaatacaacaattccaagtaatgcaacatttgcaacttcattttggtcagatgaaatgacagaaggtctaacttataatgaagatgtaacaattactttgaataatgtagctatggatcaagctgattatgaagtcactaaaggaaataatggctttaacttaaaattaacagaagcaggtttagctaaaattaatggtaaggatgcagaccaaaaaatccaaattacttactcagctactttgaactcacttgctgttgcagacattcctgaaagtaacgatattacatatcattacggaaatcatcaagatcatgggaatactccaaaaccaactaaacctaataatggtcaaattacagtaactaagacatgggacagtcaacctgctcctgagggggtgaaagcgactgttcaacttgtaaatgccaagactggtgagaaagtcggtgctcctgtagaactttcagaaaataattggacatatacttggagtggtctagataattctattgaatacaaagttgaagaagaatataatggatactcagctgaatacacagtagagagcaaagggaagttgggggtaaaaaactggaaagataataacccagctccaatcaatcctgaagaaccacgtgtaaaaacatacggtaaaaagtttgtcaaagtagaccaaaaagatactcgtctagaaaatgcgcagttcgttgttaaaaaagcagatagcaataaatatattgcctttaagtcaactgcacaacaagctgcagatgaaaaagcagcagcaactgcaaaacaaaaattggatgcagcggtagcagcttacacaaatgctgcagataagcaagccgctcaagctctagtagatcaagcacagcaagaatacaatgtagcttacaaagaagccaaatttggttatgttgaagtagctggaaaagatgaagcaatggttcttacttctaatacggatggtcaattccaaatttcaggtcttgctgctggtacttataaattagaagaaattaaagctccagaaggttttgcgaaaattgatgatgtagaatttgttgttggagcaggttcttggaatcaaggtgagtttaattacttaaaagatgttcaaaagaatgacgctacaaaagtagtcaacaaaaaaatcactggatccggcagcggtggcggtggcgcggaacaaaaaactaagacacttacagttcataaattattgatgacagatcaagagcttgacgcttggaattctgatgcgattactactgcaggttatgacggttcgcaaaattttgaacagttcaaacaacttcaaggtgttccacaaggagtaaccgaaatctctggtgttgcattcgagttacagagttatacgggtcctcaaggaaaagaacaagaaaatttaacgaatgatgcggtttggactgcggttaataaaggtgtgacgactgaaacgggtgttaaatttgatactgaagttttacaagggacatatcgtcttgtcgaagtacgtaaagaatcgacttatgtcggtccaaatggtaaagttttaacaggtatgaaagctgttcctgctttaattattctgccgcttgtaaaccaaaatggtgttgtagaaaatgcacatgtctatccaaagaattctgaagacaaacctacagcaacgaaaacatttgatactgcagcaggtttcgtagatccaggtgaaaaaggtttagcaattggcactaaggtaccgtatattgttacaacaactattccgaaaaactcaactcttgcaacagctttctggtcagatgaaatgacagaaggtctagattataatggtgatgtagttgttaattataatggtcaaccgcttgataattctcattacacattagaagcaggtcataatggctttatcttgaagttaaatgaaaaaggtctggaagcaatcaacggtaaagatgcagaagcaacaattacgttgaagtatactgcaactttaaatgctcttgctgttgctgatgtgccagaagcgaatgatgtaacattccattatggaaacaacccaggtcatggtaacactccaaaaccaaacaaacctaaaaacggtgaacttacaattactaaaacatgggctgatgctaaagatgctcctatagcaggtgtagaagtaacttttgatttggtaaatgctcagacaggtgaggtcgttaaagtacctggacatgaaacaggtattgtattgaatcaaacaaataattggacatttactgctacaggtcttgataataatacagaatataaatttgttgaacggacaattaagggatattctgcagattaccaaacaattactgaaacaggaaaaattgctgttaaaaactggaaagatgaaaatccagaaccaataaatcctgaagagccacgtgtaaaaacatatggtaaaaaattcgttaaggttgaccaaaaagacgaacgcttaaaagaagcacaattcgttgtgaagaatgagcaagggaaatatcttgcactcaaatctgcagcacaacaagctgtaaatgagaaagctgccgcagaagcgaaacaagcgctagatgcagcgatagcagcctatacaaatgctgcagataaaaatgcagcacaagctgtagtagatgctgcgcaaaaaacatataatgacaattacagagcagctagatttggctatgtagaagtagagagaaaagaagatgcgttagttcttacttctaacactgatggtcaattccaaatttcaggtcttgctgctggaagctacacgttggaagaaacaaaagctccagaaggctttgcaaaacttggagatgtgaagtttgaggttggagcaggttcttggaatcaaggtgatttcaattatttaaaagatgttcagaagaacgacgctacaaaagtagtcaacaaaaaaatcacgctcgagggcagcggtggcggtggcgctgcaacagtttttgcggctgggacgacaacaacatctgttaccgttcataaactattggcaacagatggggatatggataaaattgcaaatgagttagaaacaggtaactatgctggtaataaagtgggtgttctacctgcaaatgcaaaagaaattgccggtgttatgttcgtttggacaaatactaataatgaaattattgatgaaaatggccaaactctaggagtgaatattgatccacaaacatttaaactctcaggggcaatgccggcaactgcaatgaaaaaattaacagaagctgaaggagctaaatttaacacggcaaatttaccagctgctaagtataaaatttatgaaattcacagtttatcaacttatgtcggtgaagatggagcaaccttaacaggttctaaagcagttccaattgaaattgaattaccattgaacgatgttgtggatgcgcatgtgtatccaaaaaatacagaagcaaagccaaaaattgataaagatttcaaaggtaaagcaaatccagatacaccacgtgtagataaagatacacctgtgaaccaccaagttggagatgttgtagagtacgaaattgttacaaaaattccagcacttgctaattatgcaacagcaaactggagcgatagaatgactgaaggtttggcattcaacaaaggtacagtgaaagtaactgttgatgatgttgcacttgaagcaggtgattatgctctaacagaagtagcaactggttttgatttgaaattaacagatgctggtttagctaaagtgaatgaccaaaacgctgaaaaaactgtgaaaatcacttattcggcaacattgaatgacaaagcaattgtagaagtaccagaatctaatgatgtaacatttaactatggtaataatccagatcacgggaatactccaaagccgaataagccaaatgaaaacggcgatttgacattgaccaagacatgggttgatgctacaggtgcaccaattccggctggagctgaagcaacgttcgatttggttaatgctcagactggtaaagttgtacaaactgtaactttgacaacagacaaaaatacagttactgttaacggattggataaaaatacagaatataaattcgttgaacgtagtataaaagggtattcagcagattatcaagaaatcactacagctggagaaattgctgtcaagaactggaaagacgaaaatccaaaaccacttgatccaacagagccaaaagttgttacatatggtaaaaagtttgtcaaagttaatgataaagataatcgtttagctggggcagaatttgtaattgcaaatgctgataatgctggtcaatatttagcacgtaaagcagataaagtgagtcaagaagagaagcagttggttgttacaacaaaggatgctttagatagagcagttgctgcttataacgctcttactgcacaacaacaaactcagcaagaaaaagagaaagttgacaaagctcaagctgcttataatgctgctgtgattgctgccaacaatgcatttgaatgggtggcagataaggacaatgaaaatgttgtgaaattagtttctgatgcacaaggtcgctttgaaattacaggccttcttgcaggtacatattacttagaagaaacaaaacagcctgctggttatgcattactaactagccgtcagaaatttgaagtcactgcaacttcttattcagcgactggacaaggcattgagtatactgctggttcaggtaaagatgacgctacaaaagtagtcaacaaaaaaatcactctcgagcaccaccaccaccaccac

SEQ ID NO: 256 - protein, 1801 aa, Artificial Sequence
  Description of Artificial Sequence: Synthetic RrgB II-I-III polypeptide
MASAATVFAADNVSTAPDAVTKTLTIHKLLLSEDDLKTWDTNGPKGYDGTQSSLKDLTGVVAEEIPNVYFELQKYNLTDGKEKENLKDDSKWTTVHGGLTTKDGLKIETSTLKGVYRIREDRTKTTYVGPNGQVLTGSKAVPALVTLPLVNNNGTVIDAHVFPKNSYNKPVVDKRIADTLNYNDQNGLSIGTKIPYVVNTTIPSNATFATSFWSDEMTEGLTYNEDVTITLNNVAMDQADYEVTKGNNGFNLKLTEAGLAKINGKDADQKIQITYSATLNSLAVADIPESNDITYHYGNHQDHGNTPKPTKPNNGQITVTKTWDSQPAPEGVKATVQLVNAKTGEKVGAPVELSENNWTYTWSGLDNSIEYKVEEEYNGYSAEYTVESKGKLGVKNWKDNNPAPINPEEPRVKTYGKKFVKVDQKDTRLENAQFVVKKADSNKYIAFKSTAQQAADEKAAATAKQKLDAAVAAYTNAADKQAAQALVDQAQQEYNVAYKEAKFGYVEVAGKDEAMVLTSNTDGQFQISGLAAGTYKLEEIKAPEGFAKIDDVEFVVGAGSWNQGEFNYLKDVQKNDATKVVNKKITGSGSGGGGAATVFAAGTTTTSVTVHKLLATDGDMDKIANELETGNYAGNKVGVLPANAKEIAGVMFVWTNTNNEIIDENGQTLGVNIDPQTFKLSGAMPATAMKKLTEAEGAKFNTANLPAAKYKIYEIHSLSTYVGEDGATLTGSKAVPIEIELPLNDVVDAHVYPKNTEAKPKIDKDFKGKANPDTPRVDKDTPVNHQVGDVVEYEIVTKIPALANYATANWSDRMTEGLAFNKGTVKVTVDDVALEAGDYALTEVATGFDLKLTDAGLAKVNDQNAEKTVKITYSATLNDKAIVEVPESNDVTFNYGNNPDHGNTPKPNKPNENGDLTLTKTWVDATGAPIPAGAEATFDLVNAQTGKVVQTVTLTTDKNTVTVNGLDKNTEYKFVERSIKGYSADYQEITTAGEIAVKNWKDENPKPLDPTEPKVVTYGKKFVKVNDKDNRLAGAEFVIANADNAGQYLARKADKVSQEEKQLVVTTKDALDRAVAAYNALTAQQQTQQEKEKVDKAQAAYNAAVIAANNAFEWVADKDNENVVKLVSDAQGRFEITGLLAGTYYLEETKQPAGYALLTSRQKFEVTATSYSATGQGIEYTAGSGKDDATKVVNKKITLGGSGGGGAEQKTKTLTVHKLLMTDQELDAWNSDAITTAGYDGSQNFEQFKQLQGVPQGVTEISGVAFELQSYTGPQGKEQENLTNDAVWTAVNKGVTTETGVKFDTEVLQGTYRLVEVRKESTYVGPNGKVLTGMKAVPALIILPLVNQNGVVENAHVYPKNSEDKPTATKTFDTAAGFVDPGEKGLAIGTKVPYIVTTTIPKNSTLATAFWSDEMTEGLDYNGDVVVNYNGQPLDNSHYTLEAGHNGFILKLNEKGLEAINGKDAEATITLKYTATLNALAVADVPEANDVTFHYGNNPGHGNTPKPNKPKNGELTITKTWADAKDAPIAGVEVTFDLVNAQTGEVVKVPGHETGIVLNQTNNWTFTATGLDNNTEYKFVERTIKGYSADYQTITETGKIAVKNWKDENPEPINPEEPRVKTYGKKFVKVDQKDERLKEAQFVVKNEQGKYLALKSAAQQAVNEKAAAEAKQALDAAIAAYTNAADKNAAQAVVDAAQKTYNDNYRAARFGYVEVERKEDALVLTSNTDGQFQISGLAAGSYTLEETKAPEGFAKLGDVKFEVGAGSWNQGDFNYLKDVQKNDATKVVNKKITLGHHHHHH

SEQ ID NO: 257 - DNA, 5403 bp, Artificial Sequence
  Description of Artificial Sequence: Synthetic polynucleotide
  Sequence encoding SEQ ID NO: 256
atggctagcgctgcaacagtttttgcggcggacaatgttagtacagcaccagatgctgttactaaaactttaacaatccataagttactgctctcagaagatgatttaaagacttgggatacaaacggtcctaaaggatatgatggaactcaatctagtttaaaagatttaactggagttgtagctgaggaaattccaaatgtatactttgaattacaaaagtataatttgactgatggtaaggaaaaagaaaatcttaaagatgatagtaaatggacaacagttcatggtggtttgacaactaaagatggacttaaaattgaaaccagtactcttaaaggtgtgtatcgtattcgtgaggatagaacaaagactacctatgttggtcctaatgggcaagtattaacaggttcaaaagccgtacctgctcttgtaactcttccacttgttaacaataatggtacagtaattgatgcacatgttttccctaaaaattcatataataaaccagttgtagataaaagaattgctgatactttgaattataacgatcaaaatggtctgtctatcggtactaaaatcccatatgttgttaatacaacaattccaagtaatgcaacatttgcaacttcattttggtcagatgaaatgacagaaggtctaacttataatgaagatgtaacaattactttgaataatgtagctatggatcaagctgattatgaagtcactaaaggaaataatggctttaacttaaaattaacagaagcaggtttagctaaaattaatggtaaggatgcagaccaaaaaatccaaattacttactcagctactttgaactcacttgctgttgcagacattcctgaaagtaacgatattacatatcattacggaaatcatcaagatcatgggaatactccaaaaccaactaaacctaataatggtcaaattacagtaactaagacatgggacagtcaacctgctcctgagggggtgaaagcgactgttcaacttgtaaatgccaagactggtgagaaagtcggtgctcctgtagaactttcagaaaataattggacatatacttggagtggtctagataattctattgaatacaaagttgaagaagaatataatggatactcagctgaatacacagtagagagcaaagggaagttgggggtaaaaaactggaaagataataacccagctccaatcaatcctgaagaaccacgtgtaaaaacatacggtaaaaagtttgtcaaagtagaccaaaaagatactcgtctagaaaatgcgcagttcgttgttaaaaaagcagatagcaataaatatattgcctttaagtcaactgcacaacaagctgcagatgaaaaagcagcagcaactgcaaaacaaaaattggatgcagcggtagcagcttacacaaatgctgcagataagcaagccgctcaagctctagtagatcaagcacagcaagaatacaatgtagcttacaaagaagccaaatttggttatgttgaagtagctggaaaagatgaagcaatggttcttacttctaatacggatggtcaattccaaatttcaggtcttgctgctggtacttataaattagaagaaattaaagctccagaaggttttgcgaaaattgatgatgtagaatttgttgttggagcaggttcttggaatcaaggtgagtttaattacttaaaagatgttcaaaagaatgacgctacaaaagtagtcaacaaaaaaatcactggatccggcagcggtggcggtggcgctgcaacagtttttgcggctgggacgacaacaacatctgttaccgttcataaactattggcaacagatggggatatggataaaattgcaaatgagttagaaacaggtaactatgctggtaataaagtgggtgttctacctgcaaatgcaaaagaaattgccggtgttatgttcgtttggacaaatactaataatgaaattattgatgaaaatggccaaactctaggagtgaatattgatccacaaacatttaaactctcaggggcaatgccggcaactgcaatgaaaaaattaacagaagctgaaggagctaaatttaacacggcaaatttaccagctgctaagtataaaatttatgaaattcacagtttatcaacttatgtcggtgaagatggagcaaccttaacaggttctaaagcagttccaattgaaattgaattaccattgaacgatgttgtggatgcgcatgtgtatccaaaaaatacagaagcaaagccaaaaattgataaagatttcaaaggtaaagcaaatccagatacaccacgtgtagataaagatacacctgtgaaccaccaagttggagatgttgtagagtacgaaattgttacaaaaattccagcacttgctaattatgcaacagcaaactggagcgatagaatgactgaaggtttggcattcaacaaaggtacagtgaaagtaactgttgatgatgttgcacttgaagcaggtgattatgctctaacagaagtagcaactggttttgatttgaaattaacagatgctggtttagctaaagtgaatgaccaaaacgctgaaaaaactgtgaaaatcacttattcggcaacattgaatgacaaagcaattgtagaagtaccagaatctaatgatgtaacatttaactatggtaataatccagatcacgggaatactccaaagccgaataagccaaatgaaaacggcgatttgacattgaccaagacatgggttgatgctacaggtgcaccaattccggctggagctgaagcaacgttcgatttggttaatgctcagactggtaaagttgtacaaactgtaactttgacaacagacaaaaatacagttactgttaacggattggataaaaatacagaatataaattcgttgaacgtagtataaaagggtattcagcagattatcaagaaatcactacagctggagaaattgctgtcaagaactggaaagacgaaaatccaaaaccacttgatccaacagagccaaaagttgttacatatggtaaaaagtttgtcaaagttaatgataaagataatcgtttagctggggcagaatttgtaattgcaaatgctgataatgctggtcaatatttagcacgtaaagcagataaagtgagtcaagaagagaagcagttggttgttacaacaaaggatgctttagatagagcagttgctgcttataacgctcttactgcacaacaacaaactcagcaagaaaaagagaaagttgacaaagctcaagctgcttataatgctgctgtgattgctgccaacaatgcatttgaatgggtggcagataaggacaatgaaaatgttgtgaaattagtttctgatgcacaaggtcgctttgaaattacaggccttcttgcaggtacatattacttagaagaaacaaaacagcctgctggttatgcattactaactagccgtcagaaatttgaagtcactgcaacttcttattcagcgactggacaaggcattgagtatactgctggttcaggtaaagatgacgctacaaaagtagtcaacaaaaaaatcactctcgagggcagcggtggcggtggcgcggaacaaaaaactaagacacttacagttcataaattattgatgacagatcaagagcttgacgcttggaattctgatgcgattactactgcaggttatgacggttcgcaaaattttgaacagttcaaacaacttcaaggtgttccacaaggagtaaccgaaatctctggtgttgcattcgagttacagagttatacgggtcctcaaggaaaagaacaagaaaatttaacgaatgatgcggtttggactgcggttaataaaggtgtgacgactgaaacgggtgttaaatttgatactgaagttttacaagggacatatcgtcttgtcgaagtacgtaaagaatcgacttatgtcggtccaaatggtaaagttttaacaggtatgaaagctgttcctgctttaattattctgccgcttgtaaaccaaaatggtgttgtagaaaatgcacatgtctatccaaagaattctgaagacaaacctacagcaacgaaaacatttgatactgcagcaggtttcgtagatccaggtgaaaaaggtttagcaattggcactaaggtaccgtatattgttacaacaactattccgaaaaactcaactcttgcaacagctttctggtcagatgaaatgacagaaggtctagattataatggtgatgtagttgttaattataatggtcaaccgcttgataattctcattacacattagaagcaggtcataatggctttatcttgaagttaaatgaaaaaggtctggaagcaatcaacggtaaagatgcagaagcaacaattacgttgaagtatactgcaactttaaatgctcttgctgttgctgatgtgccagaagcgaatgatgtaacattccattatggaaacaacccaggtcatggtaacactccaaaaccaaacaaacctaaaaacggtgaacttacaattactaaaacatgggctgatgctaaagatgctcctatagcaggtgtagaagtaacttttgatttggtaaatgctcagacaggtgaggtcgttaaagtacctggacatgaaacaggtattgtattgaatcaaacaaataattggacatttactgctacaggtcttgataataatacagaatataaatttgttgaacggacaattaagggatattctgcagattaccaaacaattactgaaacaggaaaaattgctgttaaaaactggaaagatgaaaatccagaaccaataaatcctgaagagccacgtgtaaaaacatatggtaaaaaattcgttaaggttgaccaaaaagacgaacgcttaaaagaagcacaattcgttgtgaagaatgagcaagggaaatatcttgcactcaaatctgcagcacaacaagctgtaaatgagaaagctgccgcagaagcgaaacaagcgctagatgcagcgatagcagcctatacaaatgctgcagataaaaatgcagcacaagctgtagtagatgctgcgcaaaaaacatataatgacaattacagagcagctagatttggctatgtagaagtagagagaaaagaagatgcgttagttcttacttctaacactgatggtcaattccaaatttcaggtcttgctgctggaagctacacgttggaagaaacaaaagctccagaaggctttgcaaaacttggagatgtgaagtttgaggttggagcaggttcttggaatcaaggtgatttcaattatttaaaagatgttcagaagaacgacgctacaaaagtagtcaacaaaaaaatcacgctcgagcaccaccaccaccaccac

SEQ ID NO: 258 - protein, 1312 aa, Streptococcus pneumoniae; identical to SEQ ID NO: 1
  full length spr0057 as found in the R6 strain

SEQ ID NO: 259 - protein, 1062 aa, Streptococcus pneumoniae
  spr0057 with N-terminal and C-terminal truncations
LHLLVGNDGLRFMLDDMSITANGKTYASDDVKRAIEKGTNDYYNDPNGNHLTESQMTDLINYAKDKGIGLIPTVNSPGHMDAILNAMKELGIQNPNFSYFGKKSARTVDLDNEQAVAFTKALIDKYAAYFAKKTEIFNIGLDEYANDATDAKGWSVLQADKYYPNEGYPVKGYEKFIAYANDLARIVKSHGLKPMAFNDGIYYNSDTSFGSFDKDIIVSMWTGGWGGYDVASSKLLAEKGHQILNTNDAWCYVLGRNADGQGWYNLDQGLNGIKNTPITSVPKTEGADIPIIGGMVAAWADTPSARYSPSHLFKLMRHFANANAEYFAADYESAEQALNEVPKDLNRYTAESVAAVKEAEKAIRSLDSNLSRAQQDTIDQAIAKLQETVNNLTLTPEAQKEEEAKREVEKLAKNKVISIDAGRKYFTLDQLKRIVDKASELGYSDVHLLLGNDGLRFLLNDMTITANGKTYASDDVKKAIIEGTKAYYDDPNGTALTQAEVTELIEYAKSKDIGLIPAINSPGHMDAMLVAMEKLGIKNPQAHFDKVSKTTMDLKNEEAMNFVKALIGKYMDFFAGKTKIFNFGTDEYANDATSAQGWYYLKWYQLYGKFAEYANTLAAMAKERGLQPMAFNDGFYYEDKDDVQFDKDVLISYWSKGWWGYNLASPQYLASKGYKFLNTNGDWYYVIGNHKQDEAYPLSKAVENSGKVPFNQLASTKYPEVDLPTVGSMLSIWADRPSAEYKEEEIFELMTAFADHNKDYFRANYNALREELAKIPTNLEGYSKESLEALDAAKTALNYNLNRNKQAELDTLVANLKAALQGLKPAATHSGSLDENEVAANVETRPELITRTEEIPFEVIKKENPNLPAGQENIITAGVKGERTHYISVLTENGKTTETVLDSQVTKEVINQVVEVGSPVTHKGDESGLAPTTEVKPRLDIQEEEIPFTTVTRENPLLLKGKTQVITKGVNGHRSNFYSVSTSADGKEVKTLVNSVVAQEAVTQIVEVGTMVTHVGDENGQAAIAEEKPKLEIPSQPAPSTAPAEESKALPQDPAPVVTEKK

SEQ ID NO: 260 - protein, 2228 aa, Streptococcus pneumoniae; identical to SEQ ID NO: 3
  full length spr0565 as found in the R6 strain

SEQ ID NO: 261 - protein, 247 aa, Streptococcus pneumoniae; identical to SEQ ID NO: 4
  full length spr1098 as found in the R6 strain

SEQ ID NO: 262 - protein, 1062 aa, Streptococcus pneumoniae
  a variant of SEQ ID NO: 259 based on a different wild-type strain
LHLLVGNDGLRFMLDDMSITANGKTYASDDVKRAIEKGTNDYYNDPNGNHLTESQMTDLINYAKDKGIGLIPTVNSPGHMDAILNAMKELGIQNPNFSYFGKKSARTVDLDNEQAVAFTKALIDKYAAYFAKKTEIFNIGLDEYANDATDAKGWSVLQADKYYPNEGYPVKGYEKFIAYANDLARIVKSHGLKPMAFNDGIYYNSDTSFGSFDKDIIVSMWTGGWGGYDVASSKLLAEKGHQILNTNDAWYYVLGRNADGQGWYNLDQGLNGIKNTPITSVPKTEGADIPIIGGMVAAWADTPSARYSPSRLFKLMRHFANANAEYFAADYESAEQALNEVPKDLNRYTAESVTAVKEAEKAIRSLDSNLSRAQQDTIDQAIAKLQETVNNLTLTPEAQKEEEAKREVEKLAKNKVISIDAGRKYFTLNQLKRIVDKASELGYSDVHLLLGNDGLRFLLDDMTITANGKTYASDDVKKAIIEGTKAYYDDPNGTALTQAEVTELIEYAKSKDIGLIPAINSPGHMDAMLVAMEKLGIKNPQAHFDKVSKTTMDLKNEEAMNFVKALIGKYMDFFAGKTKIFNFGTDEYANDATSAQGWYYLKWYQLYGKFAEYANTLAAMAKERGLQPMAFNDGFYYEDKDDVQFDKDVLISYWSKGWWGYNLASPQYLASKGYKFLNTNGDWYYILGQKPEDGGGFLKKAIENTGKTPFNQLASTKYPEVDLPTVGSMLSIWADRPSAEYKEEEIFELMTAFADHNKDYFRANYNALREELAKIPTNLEGYSKESLEALDAAKTALNYNLNRNKQAELDTLVANLKAALQGLKPAVTHSGSLDENEVAANVETRPELITRTEEIPFEVIKKENPNLPAGQENIITAGVKGERTHYISVLTENGKTTETVLDSQVTKEVINQVVEVGAPVTHKGDESGLAPTTEVKPRLDIQEEEIPFTTVTCENPLLLKGKTQVITKGVNGHRSNFYSVSTSADGKEVKTLVNSVVAQEAVTQIVEVGTMVTHVGDENGQAAIAEEKPKLEIPSQPAPSTAPAEESKVLPQDPAPVVTEKK

SEQ ID NO: 263 - protein, 128 aa, Streptococcus pneumoniae; identical to SEQ ID NO: 6
  full length spr1416 as found in the R6 strain

SEQ ID NO: 264 - protein, 259 aa, Streptococcus pneumoniae; identical to SEQ ID NO: 7
  full length spr1418 as found in the R6 strain

SEQ ID NO: 265 - protein, 721 aa, Streptococcus pneumoniae; identical to SEQ ID NO: 8
  full length spr0867 as found in the R6 strain

SEQ ID NO: 266 - protein, 501 aa, Streptococcus pneumoniae; identical to SEQ ID NO: 9
  full length spr1431 as found in the R6 strain

SEQ ID NO: 267 - protein, 471 aa, Streptococcus pneumoniae; identical to SEQ ID NO: 10
  full length spr1739 as found in the R6 strain

SEQ ID NO: 268 - protein, 392 aa, Streptococcus pneumoniae; identical to SEQ ID NO: 11
  spr2021 as found in the R6 strain

SEQ ID NO: 269 - protein, 167 aa, Streptococcus pneumoniae; identical to SEQ ID NO: 12
  full length spr0096 as found in the R6 strain

SEQ ID NO: 270 - protein, 380 aa, Streptococcus pneumoniae
  full length spr1875 as found in the R6 strain
MKKRMLLASTVALSFAPVLATQAEEVLWTARSVEQIQNDLTKTDNKTSYTVQYGDTLSTIAEALGVDVTVLANLNKITNMDLIFPETVLTTTVNEAEEVTEVEIQTPQADSSEEVTTATADLTTNQVTVDDQTVQVADLSQPIAEAPKEVASSSEVTKTVIASEEVAPSTGTSVPEEQTAETSSAVAEEAPQETTPAEKQETQTSPQAASAVEATTTSSEAKEVASSNGATAAVSTYQPEETKIISTTYEAPAAPDYAGLAVAKSENAGLQPQTAAFKEEIANLFGITSFSGYRPGDSGDHGKGLAIDFMVPERSELGDKIAEYAIQNMASRGISYIIWKQRFYAPFDSKYGPANTWNPMPDRGSVTENHYDHVHVSMNG

SEQ ID NO: 271 - protein, 659 aa, Streptococcus pneumoniae; identical to SEQ ID NO: 14
  full length spr1707 as found in the R6 strain

SEQ ID NO: 272 - protein, 313 aa, Streptococcus pneumoniae; identical to SEQ ID NO: 28
  amino acid sequence of full length spr0884

SEQ ID NO: 273 - protein, 1247 aa, Streptococcus pneumoniae; identical to SEQ ID NO: 180
  spr0057 protein which omits the natural leader peptide and sortase recognition sequences

SEQ ID NO: 274 - protein, 1008 aa, Streptococcus pneumoniae; identical to SEQ ID NO: 181
  spr0286

SEQ ID NO: 275 - protein, 628 aa, Streptococcus pneumoniae; identical to SEQ ID NO: 182
  spr0286 fragment

SEQ ID NO: 276 - protein, 452 aa, Streptococcus pneumoniae; identical to SEQ ID NO: 183
  spr0286 fragment

SEQ ID NO: 277 - protein, 2148 aa, Streptococcus pneumoniae; identical to SEQ ID NO: 184
  spr0565 protein, which omits the natural leader peptide and sortase recognition sequences

SEQ ID NO: 278 - protein, 1063 aa, Streptococcus pneumoniae; identical to SEQ ID NO: 177
  shortened version of spr0565

SEQ ID NO: 279 - protein, 1093 aa, Streptococcus pneumoniae; identical to SEQ ID NO: 178
  shortened version of spr0565

SEQ ID NO: 280 - protein, 2233 aa, Streptococcus pneumoniae; identical to SEQ ID NO: 66
  variant form of spr0565

SEQ ID NO: 281 - protein, 218 aa, Streptococcus pneumoniae; identical to SEQ ID NO: 187
  fragment of SEQ ID NO: 261 which omits the natural leader peptide sequence

SEQ ID NO: 282 - protein, 165 aa, Streptococcus pneumoniae; identical to SEQ ID NO: 188
  spr1345

SEQ ID NO: 283 - protein, 680 aa, Streptococcus pneumoniae; identical to SEQ ID NO: 185
  Fragment of SEQ ID NO: 265 which omits the natural leader peptide sequence

SEQ ID NO: 284 - protein, 469 aa, Streptococcus pneumoniae; identical to SEQ ID NO: 189
  Fragment of SEQ ID NO: 266, which omits the natural leader peptide sequence

SEQ ID NO: 285 - protein, 471 aa, Streptococcus pneumoniae; identical to SEQ ID NO: 169
  SEQ ID NO: 267, including Pro325 to Leu mutation

SEQ ID NO: 286 - protein, 471 aa, Streptococcus pneumoniae; identical to SEQ ID NO: 171
  SEQ ID NO: 267, which includes Pro325 to Leu and Trp433 to Phe mutations

SEQ ID NO: 287 - protein, 464 aa, Streptococcus pneumoniae; identical to SEQ ID NO: 170
  SEQ ID NO: 267 with Pro325 to Leu mutation with a 7-mer truncation

SEQ ID NO: 288 - protein, 366 aa, Streptococcus pneumoniae; identical to SEQ ID NO: 190
  SEQ ID NO: 268 , which omits the natural leader peptide sequence

SEQ ID NO: 289 - protein, 195 aa, Streptococcus pneumoniae; identical to SEQ ID NO: 40
  variant form of spr0096, with an insert near its C-terminus relative to SEQ ID NO: 269

SEQ ID NO: 290 - protein, 659 aa, Streptococcus pneumoniae; identical to SEQ ID NO: 100
  variant form of spr1707

SEQ ID NO: 291 - protein, 294 aa, Streptococcus pneumoniae; identical to SEQ ID NO: 186
  Fragment of SEQ ID NO: 272, which omits the natural leader peptide sequence

SEQ ID NO: 292 - protein, 701 aa, Streptococcus pneumoniae; identical to SEQ ID NO: 15
  spr1995

SEQ ID NO: 293 - protein, 196 aa, Streptococcus pneumoniae; identical to SEQ ID NO: 16
  full length ClpP

SEQ ID NO: 294 - protein, 318 aa, Streptococcus pneumoniae; identical to SEQ ID NO: 17
  full length LytA

SEQ ID NO: 295 - protein, 828 aa, Streptococcus pneumoniae; identical to SEQ ID NO: 18
  full length PhtA precursor

SEQ ID NO: 296 - protein, 819 aa, Streptococcus pneumoniae; identical to SEQ ID NO: 19
  full length PhtB precursor
  MOD_RES (578)..(578): Any amino acid optionally lysine

SEQ ID NO: 297 - protein, 853 aa, Streptococcus pneumoniae; identical to SEQ ID NO: 20
  full length PhtD precursor

SEQ ID NO: 298 - protein, 1039 aa, Streptococcus pneumoniae; identical to SEQ ID NO: 21
  full length PhtE precursor

SEQ ID NO: 299 - protein, 1876 aa, Streptococcus pneumoniae; identical to SEQ ID NO: 22
  full length ZmpB

SEQ ID NO: 300 - protein, 448 aa, Streptococcus pneumoniae; identical to SEQ ID NO: 23
  full length CbpD

SEQ ID NO: 301 - protein, 448 aa, Streptococcus pneumoniae; identical to SEQ ID NO: 119
  variant of SEQ ID NO: 300

SEQ ID NO: 302 - protein, 42 aa, Streptococcus pneumoniae; identical to SEQ ID NO: 24
  full length CbpG

SEQ ID NO: 303 - protein, 204 aa, Streptococcus pneumoniae; identical to SEQ ID NO: 25
  full length PvaA

SEQ ID NO: 304 - protein, 339 aa, Streptococcus pneumoniae; identical to SEQ ID NO: 26
  phage CP1; full length CPL1

SEQ ID NO: 305 - protein, 279 aa, Streptococcus pneumoniae; identical to SEQ ID NO: 57
  IC23

SEQ ID NO: 306 - protein, 612 aa, Streptococcus pneumoniae; identical to SEQ ID NO: 27
  full length Hic

SEQ ID NO: 307 - protein, 619 aa, Streptococcus pneumoniae; identical to SEQ ID NO: 29
  full length PspA

SEQ ID NO: 308 - protein, 309 aa, Streptococcus pneumoniae; identical to SEQ ID NO: 30
  full length PsaA

SEQ ID NO: 309 - protein, 2144 aa, Streptococcus pneumoniae; identical to SEQ ID NO: 31
  full length PrtA

SEQ ID NO: 310 - protein, 324 aa, Streptococcus pneumoniae; identical to SEQ ID NO: 32
  full length Sp133

SEQ ID NO: 311 - protein, 339 aa, Streptococcus pneumoniae; identical to SEQ ID NO: 33
  full length PiaA

SEQ ID NO: 312 - protein, 321 aa, Streptococcus pneumoniae; identical to SEQ ID NO: 34
  full length PiuA

SEQ ID NO: 313 - protein, 279 aa, Streptococcus pneumoniae; identical to SEQ ID NO: 167
  full length CbiO

SEQ ID NO: 314 - protein, 132 aa, Streptococcus pneumoniae; identical to SEQ ID NO: 168
  30S ribosomal protein S8

SEQ ID NO: 315 - DNA, 26 bp, Artificial Sequence
  Description of Artificial Sequence: Synthetic oligonucleotide comprising 26-mer sequence 5'-(IC)13-3'
  modified_base (1)..(1): Inosine
  modified_base (3)..(3): Inosine
  modified_base (5)..(5): Inosine
  modified_base (7)..(7): Inosine
  modified_base (9)..(9): Inosine
  modified_base (11)..(11): Inosine
  modified_base (13)..(13): Inosine
  modified_base (15)..(15): Inosine
  modified_base (17)..(17): Inosine
  modified_base (19)..(19): Inosine
  modified_base (21)..(21): Inosine
  modified_base (23)..(23): Inosine
  modified_base (25)..(25): Inosine
ncncncncncncncncncncncncnc

SEQ ID NO: 316 - protein, 11 aa, Artificial Sequence
  Description of Artificial Sequence: Synthetic polycationic peptide comprising 11-mer amino acid sequence
KLKLLLLLKLK

SEQ ID NO: 317 - protein, 1427 aa, Artificial Sequence
  Description of Artificial Sequence: Synthetic hybrid polypeptide; spr0057 and spr0096
MADGVTPTTTENQPTIHTVSDSPQSSENRTEETPKAVLQPEAPKTVETETPATDKVASLPKTEEKPQEEVSSTPSDKAEVVTPTSAEKETANKKAEEASPKKEEAKEVDSKESNTDKTDKDKPAKKDEAKAEADKPATEAGKERAATVNEKLAKKKIVSIDAGRKYFSPEQLKEIIDKAKHYGYTDLHLLVGNDGLRFMLDDMSITANGKTYASDDVKRAIEKGTNDYYNDPNGNHLTESQMTDLINYAKDKGIGLIPTVNSPGHMDAILNAMKELGIQNPNFSYFGKKSARTVDLDNEQAVAFTKALIDKYAAYFAKKTEIFNIGLDEYANDATDAKGWSVLQADKYYPNEGYPVKGYEKFIAYANDLARIVKSHGLKPMAFNDGIYYNSDTSFGSFDKDIIVSMWTGGWGGYDVASSKLLAEKGHQILNTNDAWYYVLGRNADGQGWYNLDQGLNGIKNTPITSVPKTEGADIPIIGGMVAAWADTPSARYSPSRLFKLMRHFANANAEYFAADYESAEQALNEVPKDLNRYTAESVTAVKEAEKAIRSLDSNLSRAQQDTIDQAIAKLQETVNNLTLTPEAQKEEEAKREVEKLAKNKVISIDAGRKYFTLNQLKRIVDKASELGYSDVHLLLGNDGLRFLLDDMTITANGKTYASDDVKKAIIEGTKAYYDDPNGTALTQAEVTELIEYAKSKDIGLIPAINSPGHMDAMLVAMEKLGIKNPQAHFDKVSKTTMDLKNEEAMNFVKALIGKYMDFFAGKTKIFNFGTDEYANDATSAQGWYYLKWYQLYGKFAEYANTLAAMAKERGLQPMAFNDGFYYEDKDDVQFDKDVLISYWSKGWWGYNLASPQYLASKGYKFLNTNGDWYYILGQKPEDGGGFLKKAIENTGKTPFNQLASTKYPEVDLPTVGSMLSIWADRPSAEYKEEEIFELMTAFADHNKDYFRANYNALREELAKIPTNLEGYSKESLEALDAAKTALNYNLNRNKQAELDTLVANLKAALQGLKPAVTHSGSLDENEVAANVETRPELITRTEEIPFEVIKKENPNLPAGQENIITAGVKGERTHYISVLTENGKTTETVLDSQVTKEVINQVVEVGAPVTHKGDESGLAPTTEVKPRLDIQEEEIPFTTVTCENPLLLKGKTQVITKGVNGHRSNFYSVSTSADGKEVKTLVNSVVAQEAVTQIVEVGTMVTHVGDENGQAAIAEEKPKLEIPSQPAPSTAPAEESKVLPQDPAPVVTEKKGSGSGGGGVSAQESSTYTVKEGDTLSEIAETHNTTVEKLAENNHIDNIHLIYVDQELVIDGPVAPVATPAPATYAAPAAQDETVSAPVAETPVVSETVVSTVSGSEAEAKEWIAQKESGGSYTATNGRYIGRYQLTDSYLNGDYSAENQERVADAYVAGRYGSWTAAKNFWLNNGWYLE

SEQ ID NO: 318 - protein, 1242 aa, Artificial Sequence
  Description of Artificial Sequence: Synthetic hybrid polypeptide; spr0057 and spr0096
MLHLLVGNDGLRFMLDDMSITANGKTYASDDVKRAIEKGTNDYYNDPNGNHLTESQMTDLINYAKDKGIGLIPTVNSPGHMDAILNAMKELGIQNPNFSYFGKKSARTVDLDNEQAVAFTKALIDKYAAYFAKKTEIFNIGLDEYANDATDAKGWSVLQADKYYPNEGYPVKGYEKFIAYANDLARIVKSHGLKPMAFNDGIYYNSDTSFGSFDKDIIVSMWTGGWGGYDVASSKLLAEKGHQILNTNDAWYYVLGRNADGQGWYNLDQGLNGIKNTPITSVPKTEGADIPIIGGMVAAWADTPSARYSPSRLFKLMRHFANANAEYFAADYESAEQALNEVPKDLNRYTAESVTAVKEAEKAIRSLDSNLSRAQQDTIDQAIAKLQETVNNLTLTPEAQKEEEAKREVEKLAKNKVISIDAGRKYFTLNQLKRIVDKASELGYSDVHLLLGNDGLRFLLDDMTITANGKTYASDDVKKAIIEGTKAYYDDPNGTALTQAEVTELIEYAKSKDIGLIPAINSPGHMDAMLVAMEKLGIKNPQAHFDKVSKTTMDLKNEEAMNFVKALIGKYMDFFAGKTKIFNFGTDEYANDATSAQGWYYLKWYQLYGKFAEYANTLAAMAKERGLQPMAFNDGFYYEDKDDVQFDKDVLISYWSKGWWGYNLASPQYLASKGYKFLNTNGDWYYILGQKPEDGGGFLKKAIENTGKTPFNQLASTKYPEVDLPTVGSMLSIWADRPSAEYKEEEIFELMTAFADHNKDYFRANYNALREELAKIPTNLEGYSKESLEALDAAKTALNYNLNRNKQAELDTLVANLKAALQGLKPAVTHSGSLDENEVAANVETRPELITRTEEIPFEVIKKENPNLPAGQENIITAGVKGERTHYISVLTENGKTTETVLDSQVTKEVINQVVEVGAPVTHKGDESGLAPTTEVKPRLDIQEEEIPFTTVTCENPLLLKGKTQVITKGVNGHRSNFYSVSTSADGKEVKTLVNSVVAQEAVTQIVEVGTMVTHVGDENGQAAIAEEKPKLEIPSQPAPSTAPAEESKVLPQDPAPVVTEKKGSGSGGGGVSAQESSTYTVKEGDTLSEIAETHNTTVEKLAENNHIDNIHLIYVDQELVIDGPVAPVATPAPATYAAPAAQDETVSAPVAETPVVSETVVSTVSGSEAEAKEWIAQKESGGSYTATNGRYIGRYQLTDSYLNGDYSAENQERVADAYVAGRYGSWTAAKNFWLNNGWYLE

SEQ ID NO: 319 - protein, 549 aa, Artificial Sequence
  Description of Artificial Sequence: Synthetic hybrid polypeptide; spr0096 and spr2021
MVSAQESSTYTVKEGDTLSEIAETHNTTVEKLAENNHIDNIHLIYVDQELVIDGPVAPVATPAPATYAAPAAQDETVSAPVAETPVVSETVVSTVSGSEAEAKEWIAQKESGGSYTATNGRYIGRYQLTDSYLNGDYSAENQERVADAYVAGRYGSWTAAKNFWLNNGWYGSGSGGGGAETTDDKIAAQDNKISNLTAQQQEAQKQVDQIQEQVSAIQAEQSNLQAENDRLQAESKKLEGEITELSKNIVSRNQSLEKQARSAQTNGAVTSYINTIVNSKSITEAISRVAAMSEIVSANNKMLEQQKADKKAISEKQVANNDAINTVIANQQKLADDAQALTTKQAELKAAELSLAAEKATAEGEKASLLEQKAAAEAEARAAAVAEAAYKEKRASQQQSVLASANTNLTAQVQAVSESAAAPVRAKVRPTYSTNASSYPIGECTWGVKTLAPWAGDYWGNGAQWATSAAAAGFRTGSTPQVGAIACWNDGGYGHVAVVTAVESTTRIQVSESNYAGNRTIGNHRGWFNPTTTSEGFVTYIYADAAALE

SEQ ID NO: 320 - protein, 665 aa, Streptococcus pneumoniae
  RrgB sequence
MKSINKFLTMLAALLLTASSLFSAATVFAAGTTTTSVTVHKLLATDGDMDKIANELETGNYAGNKVGVLPANAKEIAGVMFVWTNTNNEIIDENGQTLGVNIDPQTFKLSGAMPATAMKKLTEAEGAKFNTANLPAAKYKIYEIHSLSTYVGEDGATLTGSKAVPIEIELPLNDVVDAHVYPKNTEAKPKIDKDFKGKANPDTPRVDKDTPVNHQVGDVVEYEIVTKIPALANYATANWSDRMTEGLAFNKGTVKVTVDDVALEAGDYALTEVATGFDLKLTDAGLAKVNDQNAEKTVKITYSATLNDKAIVEVPESNDVTFNYGNNPDHGNTPKPNKPNENGDLTLTKTWVDATGAPIPAGAEATFDLVNAQTGKVVQTVTLTTDKNTVTVNGLDKNTEYKFVERSIKGYSADYQEITTAGEIAVKNWKDENPKPLDPTEPKVVTYGKKFVKVNDKDNRLAGAEFVIANADNAGQYLARKADKVSQEEKQLVVTTKDALDRAVAAYNALTAQQQTQQEKEKVDKAQAAYNAAVIAANNAFEWVADKDNENVVKLVSDAQGRFEITGLLAGTYYLEETKQPAGYALLTSRQKFEVTATSYSATGQGIEYTAGSGKDDATKVVNKKITIPQTGGIGTIIFAVAGAVIMGIAVYAYVKNNKDEDQLA

SEQ ID NO: 321 - protein, 644 aa, Streptococcus pneumoniae
  RrgB sequence
MKSINKFLTMLAALLLTASSLFSAATVFAADNVSTAPDAVTKTLTIHKLLLSEDDLKTWDTNGPKGYDGTQSSLKDLTGVVAEEIPNVYFELQKYNLTDGKEKENLKDDSKWTTVHGGLTTKDGLKIETSTLKGVYRIREDRTKTTYVGPNGQVLTGSKAVPALVTLPLVNNNGTVIDAHVFPKNSYNKPVVDKRIADTLNYNDQNGLSIGTKIPYVVNTTIPSNATFATSFWSDEMTEGLTYNEDVTITLNNVAMDQADYEVTKGINGFNLKLTEAGLAKINGKDADQKIQITYSATLNSLAVADIPESNDITYHYGNHQDHGNTPKPTKPNNGQITVTKTWDSQPAPEGVKATVQLVNAKTGEKVGAPVELSENNWTYTWSGLDNSIEYKVEEEYNGYSAEYTVESKGKLGVKNWKDNNPAPINPEEPRVKTYGKKFVKVDQKDTRLENAQFVVKKADSNKYIAFKSTAQQAADEKAAATAKQKLDAAVAAYTNAADKQAAQALVDQAQQEYNVAYKEAKFGYVEVAGKDEAMVLTSNTDGQFQISGLAAGTYKLEEIKAPEGFAKIDDVEFVVGAGSWNQGEFNYLKDVQKNDATKVVNKKITIPQTGGIGTIIFAVAGAAIMGIAVYAYVKNNKDEDQLA

SEQ ID NO: 322 - protein, 654 aa, Streptococcus pneumoniae
  RrgB sequence
MKSINKFLTMLAALLLTASSLFSAATVFAAEQKTKTLTVHKLLMTDQELDAWNSDAITTAGYDGSQNFEQFKQLQGVPQGVTEISGVAFELQSYTGPQGKEQENLTNDAVWTAVNKGVTTETGVKFDTEVLQGTYRLVEVRKESTYVGPNGKVLTGMKAVPALIILPLVNQNGVVENAHVYPKNSEDKPTATKTFDTAAGFVDPGEKGLAIGTKVPYIVTTTIPKNSTLATAFWSDEMTEGLDYNGDVVVNYNGQPLDNSHYTLEAGHNGFILKLNEKGLEAINGKDAEATITLKYTATLNALAVADVPEANDVTFHYGNNPGHGNTPKPNKPKNGELTITKTWADAKDAPIAGVEVTFDLVNAQTGEVVKVPGHETGIVLNQTNNWTFTATGLDNNTEYKFVERTIKGYSADYQTITETGKIAVKNWKDENPEPINPEEPRVKTYGKKFVKVDQKDERLKEAQFVVKNEQGKYLALKSAAQQAVNEKAAAEAKQALDAAIAAYTNAADKNAAQAVVDAAQKTYNDNYRAARFGYVEVERKEDALVLTSNTDGQFQISGLAAGSYTLEETKAPEGFAKLGDVKFEVGAGSWNQGDFNYLKDVQKNDATKVVNKKITIPQTGGIGTIIFAVAGAVIMGIAVYAYVKNNKDEDQLA

SEQ ID NO: 323 - protein, 665 aa, Streptococcus pneumoniae
  RrgB sequence
MKSINKFLTMLAALLLTASSLFSAATVFAAGTTTTSVTVHKLLATDGDMDKIANELETGNYAGNKVGVLPANAKEIAGVMFVWTNTNNEIIDENGQTLGVNIDPQTFKLSGAMPATAMKKLTEAEGAKFNTANLPAAKYKIYEIHSLSTYVGEDGATLTGSKAVPIEIELPLNDVVDAHVYPKNTEAKPKIDKDFKGKANPDTPRVDKDTPVNHQVGDVVEYEIVTKIPALANYATANWSDRMTEGLAFNKGTVKVTVDDVALEAGDYALTEVATGFDLKLTDAGLAKVNDQNAEKTVKITYSATLNDKAIVEVPESNDVTFNYGNNPDHGNTPKPNKPNENGDLTLTKTWVDATGAPIPAGAEATFDLVNAQTGKVVQTVTLTTDKNTVTVNGLDKNTEYKFVERSIKGYSADYQEITTAGEIAVKNWKDENPKPLDPTEPKVVTYGKKFVKVNDKDNRLAGAEFVIANADNAGQYLARKADKVSQEEKQLVVTTKDALDRAVAAYNALTAQQQTQQEKEKVDKAQAAYNAAVIAANNAFEWVADKDNENVVKLVSDAQGRFEITGLLAGTYYLEETKQPAGYALLTSRQKFEVTATSYSATGQGIEYTAGSGKDDATKVVNKKIMIPQPGGIGTIIFAVAGAVIMGIAVYAYVKNNKDEDQLA

SEQ ID NO: 324 - protein, 665 aa, Streptococcus pneumoniae
  RrgB sequence
MKSINKFLTMLAALLLTASSLFSAATVFAAGTTTTSVTVHKLLATDGDMDKIANELETGNYAGNKVGVLPANAKEIAGVMFVWTNTNNEIIDENGQTLGVNIDPQTFKLSGAMPATAMKKLTEAEGAKFNTANLPAAKYKIYEIHSLSTYVGEDGATLTGSKAVPIEIELPLNDVVDAHVYPKNTEAKPKIDKDFKGKANPDTPRVDKDTPVNHQVGDVVEYEIVTKIPALANYATANWSDRMTEGLAFNKGTVKVTVDDVALEAGDYALTEVATGFDLKLTDAGLAKVNDQNAEKTVKITYSATLNDKAIVEVPESNDVTFNYGNNPDHGNTPKPNKPNENGDLTLTKTWVDDTGAAIPAGDEATFDLVNAQTGKVVQLVTSSTDKNTVTVTGLDKNTEYKFVERSIKGYSADYQEITTAGEIAVKNWKDENPKPLDPTEPKVVTYGKKFVKVNDKDNRLAGAEFVIANADNAGQYLARKADKVSQEEKQLVVTTKDALDRAVAAYNALTAQQQTQQEKEKVDKAQAAYNAAVIAANNAFEWVADKDNENVVKLVSDAQGRFEITGLLAGTYYLEETKQPAGYALLTSRQKFEVTATSYSATGQGIEYTAGSGKDDATKVVNKKITIPQTGGIGTIIFAVAGAVIMGIAVYAYVKNNKDEDHLA

SEQ ID NO: 325 - protein, 644 aa, Streptococcus pneumoniae
  RrgB sequence
MKSINKFLTMLAALLLTASSLFSAATVFAADNVSTAPDAVTKTLTIHKLLLSEDDLKTWDTNGPKGYDGTQSSLKDLTGVVAEEIPNVYFELQKYNLTDGKEKENLKDDSKWTTVHGGLTTKDGLKIETSTLKGVYRIREDRTKTTYVGPNGQVLTGSKAVPALVTLPLVNNNGTVIDAHVFPKNSYNKPVVDKRIADTLNYNDQNGLSIGTKIPYVVNTTIPSNATFATSFWSDEMTEGLTYNEDVTITLNNVAMDQADYEVTKGINGFNLKLTEAGLAKINGKDADQKIQITYSATLNSLAVADIPESNDITYHYGNHQDHGNTPKPTKPNNGQITVTKTWDSQPAPEGVKATVQLVNAKTGEKVGAPVELSENNWTYTWSGLDNSIEYKVEEEYNGYSAEYTVESKGKLGVKNWKDNNPAPINLEEPRVKTYGKKFVKVDQKDTRLENAQFVVKKADSNKYIAFKSTAQQAADEKAAATAKQKLDAAVAAYTNAADKQAAQALVDQAQQEYNVAYKEAKFGYVEVAGKDEAMVLTSNTDGQFQISGLAAGTYKLEEIKAPEGFAKIDDVEFVVGAGSWNQGEFNYLKDVQKNDATKVVNKKITIPQTGGIGTIIFAVAGAVIMGIAVYAYVKNNKDEDQLA

SEQ ID NO: 326 - protein, 644 aa, Streptococcus pneumoniae
  RrgB sequence
MKSINKFLTMLAALLLTASSLFSAATVFAADNVSTAPDAVTKTLTIHKLLLSEDDLKTWDTNGPKGYDGTQSSLKDLTGVVAEEIPNVYFELQKYNLTDGKEKENLKDDSKWTTVHGGLTTKDGLKIETSTLKGVYRIREDRTKTTYVGPNGQVLTGSKAVPALVTLPLVNNNGTVIDAHVFPKNSYNKPVVDKRIADTLNYNDQNGLSIGTKIPYVVNTTIPSNATFATSFWSDEMTEGLTYNEDVTITLNNVAMDQADYEVTKGNNGFNLKLTEAGLAKINGKDADQKIQITYSATLNSLAVADIPESNDITYHYGNHQDHGNTPKPTKPNNGQITVTKTWDSQPAPEGVKATVQLVNAKTGEKVGAPVELSENNWTYTWSGLDNSIEYKVEEEYNGYSAEYTVESKGKLGVKNWKDNNPAPINPEEPRVKTYGKKFVKVDQKDTRLENAQFVVKKADSNKYIAFKSTAQQAADEKAAATAKQKLDAAVAAYTNAADKQDAQALVDQAQQEYNVAYKEAKFGYVEVAGKDEAMVLTSNTDGQFQISGLAAGTYKLEEIKAPEGFAKIDDVEFVVGAGSWNQGEFNYLKDVQKNDATKVVNKKITIPQTGGIGTIIFAVAGAAIMGIAVYAYVKNNKDEDQLA

SEQ ID NO: 327 - protein, 654 aa, Streptococcus pneumoniae
  RrgB sequence
MKSINKFLTILAALLLTVSSLFSAATVFAAEQKTKTLTVHKLLMTDQELDAWNSDAITTAGYDGSQNFEQFKQLQGVPQGVTEISGVAFELQSYTGPQGKEQENLTNDAVWTAVNKGVTTETGVKFDTEVLQGTYRLVEVRKESTYVGPNGKVLTGMKAVPALIILPLVNQNGVVENAHVYPKNSEDKPTATKTFDTAAGFVDPGEKGLAIGTKVPYIVTTTIPKNSTLATAFWSDEMTEGLDYNGDVVVNYNGQPLDNSHYTLEAGHNGFILKLNEKGLEAINGKDAEATIALKYTATLNALAVADVPEANDVTFHYGNNPGHGNTPKPNKPKNGELTITKTWADAKDAPIAGVEVTFDLVNAQTGEVVKVPGHETGIVLNQTNNWTFTATGLDNNTEYKFVERTIKGYSADYQTITETGKIAVKNWKDENPEPINPEEPRVKTYGKKFVKVDQKDERLKEAQFVVKNEQGKYLALKSAAQQAVNEKAAAEAKQALDAAIAAYTNAADKNAAQAVVDAAQKTYNDNYRAARFGYVEVERKEDALVLTSNTDGQFQISGLAAGSYTLEETKAPEGFAKLGDVKFEVGAGSWNQGDFNYLKDVQKNDATKVVNKKITIPQTGGIGTIIFAVAGAVIMGIAVYAYVKNNKDEDQLA

SEQ ID NO: 328 - protein, 654 aa, Streptococcus pneumoniae
  RrgB sequence
MKSINKFLTILAALLLTVSSLFSAATVFAAEQKTKTLTVHKLLMTDQELDAWNSDAITTAGYDGSQNFEQFKQLQGVPQGVTEISGVAFELQSYTGPQGKEQENLTNDAVWTAVNKGVTTETGVKFDTEVLQGTYRLVEVRKESTYVGPNGKVLTGMKAVPALIILPLVNQNGVVENAHVYPKNSEDKPTATKTFDTAAGFVDPGEKGLAIGTKVPYIVTTTIPKNSTLATAFWSDEMTEGLDYNGDVVVNYNGQPLDNSHYTLKAGHNGFILKLNEKGLEAINGKDAEATITLKYTATLNALAVADVPKANDVTFHYGNNPGHGNTPKPNKPKNGELTITKTWADAKDAPIAGVEVTFDLVNAQTGEVVKVPGHETGIVLNQTNNWTFTATGLDNNTEYKFVERTIKGYSADYQTITETGKIAVKNWKDENPEPINPEEPRVKTYGKKFVKVDQKDERLKEAQFVVKNEQGKYLALKSAAQQAVNEKAAAEAKQALDAAIAAYTNAADKNAAQAVVDAAQKTYNDNYRAARFGYVEVERKEDALVLTSNTDGQFQISGLAAGSYTLEETKAPEGFAKLGDVKFEVGAGSWNQGDFNYLKDVQKNDATKVVNKKITIPQTGGIGTIIFAVAGAVIMGIAVYAYVKNNKDEDQLA

SEQ ID NO: 329 - protein, 644 aa, Streptococcus pneumoniae
  RrgB sequence
MKSINKFLTMLAALLLTASSLFSAATVFAADNVSTAPDAVTKTLTIHKLLLSEDDLETWDTNGPKGYDGTQSSLKDLTGVVAEEIPNVYFELQKYNLTDGKEKENLKDDSKWTTVHGGLTTKDGLKIETSTLKGVYRIREDRTKTTYVGPNGQVLTGSKAVPALVTLPLVNNNGTVIDAHVFPKNSYNKPVVDKRIADTLNYNDQNGLSIGTKIPYVVNTTIPSNATFATSFWSDEMTEGLTYNEDVTITLNNVAMDQADYEVTKGINGFNLKLTEAGLAKINGKDADQKIQITYSATLNSLAVADIPESNDITYHYGNHQDHGNTPKPTKPNNGQITVTKTWDSQPAPEGVKATVQLVNAKTGEKVCAPVELSENNWTYTWSGLDNSIEYKVEEEYNGYSAEYTVESKGKLGVKNWKDNNPAPINPEEPRVKTYGKKFVKVDQKDTRLENAQFVVKKADSNKYIAFKSTAQQAADEKAAATAKQKLDAAVAAYTNAADKQAAQALVDQAQQEYNVAYKEAKFGYVEVAGKDEAMVLTSNTDGQFQISGLAAGTYKLEEIKAPEGFAKIDDVEFVVGAGSWNQGEFNYLKDVQKNDATKVVNKKITIPQTGGIGTIIFAVAGAAIMGIAVYAYVKNNKDEDQLA

SEQ ID NO: 330 - protein, 654 aa, Streptococcus pneumoniae
  RrgB sequence
MKSINKFLTILAALLLTVSSLFSAATVFAAEQKTKTLTVHKLLMTDQELDAWNSDAITTAGYDGSQNFEQFKQLQGVPQGVTEISGVAFELQSYTGPQGKEQENLTNDAVWTAVNKGVTTETGVKFDTEVLQGTYRLVEVRKESTYVGPNGKVLTGMKAVPALITLPLVNQNGVVENAHVYPKNSEDKPTATKTFDTAAGFVDPGEKGLAIGTKVPYIVTTTIPKNSTLATAFWSDEMTEGLDYNGDVVVNYNGQPLDNSHYTLEAGHNGFILKLNEKGLEAINGKDAKATITLKYTATLNALAVADVPEANDVTFHYGNNPGHGNTPKPNKPKNGELTITKTWADAKDAPIAGVEVTFDLVNAQTGEVVKVPGHETGIVLNQTNNWTFTATGLDNNTEYKFVERTIKGYSADYQTITETGKIAVKNWKDENPEPINPEEPRVKTYGKKFVKVDQKDERLKEAQFVVKNEQGKYLALKSAAQQAVNEKAAAEAKQALDAAIAAYTNAADKNAAQAVVDAAQKTYNDNYRAARFGYVEVERKEDALVLTSNTDGQFQISGLAAGSYTLEETKAPEGFAKLGDVKFEVGAGSWNQGDFNYLKDVQKNDATKVVNKKITIPQTGGIGTIIFAVAGAVIMGIAVYAYVKNNKDEDQLA

SEQ ID NO: 331 - protein, 644 aa, Streptococcus pneumoniae
  RrgB sequence
MKSINKFLTMLAALLLTASSLFSAATVFAADNVSTAPDAVTKTLTIHKLLLSEDDLKTWDTNGPKGYDGTQSSLKDLTGVVAEEIPNVYFELQKYNLTDGKEKENLKDDSKWTTVHGGLTTKDGLKIETSTLKGVYRIREDRTKTTYVGPNGQVLTGSKAVPALVTLPLVNNNGTVIDAHVFPKNSYNKPVVDKRIADTLNYNDQNGLSIGTKIPYVVNTTIPSNATFATSFWSDEMTEGLTYNEDVTITLNNVAMDQADYEVTKGINGFNLKLTEAGLAKINGKDADQKIQITYSATLNSLAVADIPESNDITYHYGNHQDHGNTPKPTKPNNGQITVTKTWDSQPAPEGVKATVQLVNAKTGEKVGAPVELSENNWTYTWSGLDNSIEYKVEEEYNGYSAEYTVESKGKLGVKNWKDNNPAPINLEEPRVKTYGKKFVKVDQKDTRLENAQFVVKKADSNKYIAFKSTAQQAADEKAAASAKQKLDAAVAAYTNAADKQAAQALVDQAQQEYNVAYKEAKFGYVEVAGKDEAMVLTSNTDGQFQISGLAAGTYKLEEIKAPEGFAKIDDVEFVVGAGSWNQGEFNYLKDVQKNDATKVVNKKITIPQTGGIGTIIFAVAGAAIMGIAVYAYVKNNKDEDQLA

SEQ ID NO: 332 - protein, 251 aa, Streptococcus pneumoniae
  fragment of spr2021 (SP2216-1)
ETTDDKIAAQDNKISNLTAQQQEAQKQVDQIQEQVSAIQAEQSNLQAENDRLQAESKKLEGEITELSKNIVSRNQSLEKQARSAQTNGAVTSYINTIVNSKSITEAISRVAAMSEIVSANNKMLEQQKADKKAISEKQVANNDAINTVIANQQKLADDAQALTTKQAELKAAELSLAAEKATAEGEKASLLEQKAAAEAEARAAAVAEAAYKEKRASQQQSVLASANTNLTAQVQAVSESAAAPVRAKVRP

SEQ ID NO: 333 - protein, 315 aa, Streptococcus pneumoniae
  SP 1732-3
YLILLASLVLVAASLIWILSRTPATIAIPDVAGQTVAEAKATLKKANFEIGEEKTEASEKVEEGRIIRTDPGAGTGRKEGTKINLVVSSGKQSFQISNYVGRKSSDVIAELKEKKVPDNLIKIEEEESNESEAGTVLKQSLPEGTTYDLSKATQIVLTVAKKATTIQLGNYIGRNSTEVISELKQKKVPENLIKIEEEESSESEPGTIMKQSPGAGTTYDVSKPTQIVLTVAKKVTSVAMPSYIGSSLEFTKNNLIQIVGIKEANIEVVEVTTAPAGSVEGMVVEQSPRAGEKVDLNKTRVKISIYKPKTTSATP

SEQ ID NO: 334 - protein, 289 aa, Streptococcus pneumoniae
  PsaA fragment
ASGKKDTTSGQKLKVVATNSIIADITKNIAGDKIDLHSIVPIGQDPHEYEPLPEDVKKTSEADLIFYNGINLETGGNAWFTKLVENAKKTENKDYFAVSDGVDVIYLEGQNEKGKEDPHAWLNLENGIIFAKNIAKQLSAKDPNNKEFYEKNLKEYTDKLDKLDKESKDKFNKIPAEKKLIVTSEGAFKYFSKAYGVPSAYIWEINTEEEGTPEQIKTLVEKLRQTKVPSLFVESSVDDRPMKTVSQDTNIPIYAQIFTDSIAEQGKEGDSYYSMMKYNLDKIAEGLAK

SEQ ID NO: 335 - protein, 20 aa, Streptococcus pneumoniae
  RrgB Clade I D1 Epitope
HKLLATDGDMDKIANELETG

SEQ ID NO: 336 - protein, 15 aa, Streptococcus pneumoniae
  RrgB Clade I D4 Epitope
VTTKDALDRAVAAYN

SEQ ID NO: 337 - protein, 20 aa, Streptococcus pneumoniae
  RrgB Clade II D1 Epitope
VTKTLTIHKLLLSEDDLKTW

SEQ ID NO: 338 - protein, 15 aa, Streptococcus pneumoniae
  RrgB Clade II D4 Epitope
YTNAADKQAAQALVD

SEQ ID NO: 339 - protein, 20 aa, Streptococcus pneumoniae
  RrgB Clade III D1 Epitope
HKLLMTDQELDAWNSDAITT

SEQ ID NO: 340 - protein, 15 aa, Streptococcus pneumoniae
  RrgB Clade III D4 Epitope
KQALDAAIAAYTNAA

1. A composition selected from the group consisting of:
(A) a composition comprising (i) a TLR agonist, (ii) an insoluble metal salt, and (iii) one or more S. pneumoniae saccharide or protein agtigens, wherein the TLR agonist is an agonist of human TLR7;
(B) a composition comprising (i) a TLR agonist, (ii) an insoluble metal salt, and (ii) one or more S. pneumoniae saccharride or protein antigens, wherein the insoluble metal salt is an aluminium salt;
(C) a composition comprising (i) a TLR agonist, (ii) an insoluble metal salt, (iii) a buffer, and (iv) one or more S. pneumoniae saccharide or protein antigens;
(D) a composition comprising (i) a TLR agonist, (ii) an insoluble metal salt, and (iii) one or more S. pneumoniae saccharide or protein antigens, wherein the pH of the composition is pH 6 to pH 8;
(E) a composition comprising (i) a TLR agonist, (ii) an insoluble metal salt, and (iii) one or more S. pneumoniae saccharide antigens, wherein at least one of the one or more S. pneumoniae saccharide antigens is conjugate to CMR197;
(F) a composition comprising (i) a TLR agonist, (ii) an insoluble metal salt, and (iii) one or more S. pneumoniae saccharide antigens selected from 2-10 different S. pneumoniae saccharide antigens serotypes;
(G) a composition comprising (i) a TLR agnoist, (ii) an insoluble metal salt, and (iii), S. pneumoniae saccharide antigens consisiting of 11 different serotypes, provided that the 11 different serotypes are not all of the serotypes in the group consisting of 1, 3, 4, 5, 6B, 7F, 9V, 14, 18C, 19F and 23F;
(H) a composition comprising (i) a TLR agnoist, (ii) an insoluble metal salt, and (iii) one or more S. pneumoniae saccharide antigens, wherein at least one of the one or more S. pneumoniae saccharide antigens is conjugated directly to a carrier;
(I) a composition comprising (i) an aluminum hydroxide adjuvant, (ii) a TLR7 agonist of formula (K) [chemical structure]
(iii) one or more S. pneumoniae saccharide antigens selected from the group consisting of serotypes 1, 5, 6B, 14, and 23F, wherein each saccharide is conjugated to CRM₁₉₇ and at least one of the TLR7 agonist or at least one of the saccharides is adsorbed to the aluminium hydroxide adjuvant;
(J) a composition comprising; (i) an aluminium hydroxide adjuvant, (ii) a TLR7 agonist of formula (K) [chemical structure]
(iii) one or more S. pneumoniae saccharide antigen from only serotype 5 conjugated to CRM₁₉₇ wherein at least one of the TLR7 agonists or at least one of the saccharides is adsobred to the aluminum hydroxide adjuvant; and
(K) a composition comprising: (i) an adjuvant complex comprising a first TLR agonist adsorbed to an insoluble metal salt, (ii) an adjuvant complex comprising a second TLR agonist adsorbed to an insoluble metal salt, and (iii) one or more S. pneumoniae saccharide or protein antigens.

2-12. (canceled)

13. The composition of claim 1, wherein the one or more S. pneumoniae saccharide antigens has a serotype selected from the goup consisting of serotypes 1, 2, 3, 4, 5, 6A, 6B, 7F, 8, 9N, 9V, 10A, 11A, 12F, 14, 15B, 17F, 18C, 19A, 19F, 20, 22F, 23F, and 33F.

14. The composition of claim 13, comprising a 5-, 7-, 9-, 10-, 11-, 12-, or 13-valent combination of serotypes.

15. The composition of claim 14, wherein the 5-valent combination of S. pneumoniae saccharides serotypes is 1, 5, 6B, 14, and 23F.

16. (canceled)

17. The composition of claim 14, wherein the 5-valent combination of S. pneumoniae saccharides is serotypes 4, 6B, 9V, 14, 18C, 19F, and 23F.

18. (canceled)

19. The composition of claim 14, wherein the 9-valent combination of S. pneumoniae saccharides is serotypes 1, 4, 5, 6B, 9V, 14, 18C, 19F, and 23F.

20. (canceled)

21. The composition of claim 14, wherein the 10-valent combination of S. pneumoniae saccharides is serotypes 1, 4, 5, 6B, 7F, 9V, 14, 18C, 19F, and 23F.

22-23. (canceled)

24. The composition of claim 14, wherein the 12-valent combination of serotypes is sterotypes 1, 4, 5, 6B, 7F, 9V, 14, 18C, 19F, and 23F, further comprising two additional serotypes selected from the groups consisting of 6A and 19A; 6A and 22F; 19A and 22F; 6A and 15B; 19A and 15B; and 22F and 15B.

25. (canceled)

26. The composition of claim 14, wherein the 13-valent combination of serotypes is serotypes 1, 3, 4, 5, 6B, 7F, 9V, 14, 18C, 19F, and 23F, and two additional serotypes selected from the groups consisting of: 19A and 22F; 8 and 12F; 8 and 15B; 8 and 19A; 8 and 22F; 12F and 15B; 12F and 19A; 12F and 22F; 15B and 19A; 15B and 22F; and 6A and 19A.

27. The composition of claim 26, wherein the 13-valent combination of serotypes is serotypes 1, 3, 4, 5, 6A, 6B, 7F, 9V, 14, 18C, 19, 19F, and 23F, or serotypes 1, 3, 4, 5, 6A, 6B, 7F, 9V, 14, 18C, 19A, 19F, and 23F.

28. The composition of claim 1, comprising an S. pneumoniae saccharide antigen from a serotype selected from the group consisting of serotypes 1, 2, 3, 4, 5, 6A, 6B, 7F, 8, 9N, 9V, 10A, 11A, 12F, 14, 15B, 17F, 18C, 19A, 19F, 20, 22F, 23F, and 33F.

29. The composition of claim 28, wherein the serotype is selected from the group consisting of serotype 1, 5, 6B, 14, and 23F.

30. The composition of claim 1, wherein the one or more S. pneumoniae saccharide antigens is conjugated to a carrier protein.

31. The composition of claim 30, wherein a carrier protein is selected from the group consisting of a bacterial toxin, a bacterial toxoid, a mutant bacterial toxin, and a mutant bacterial toxoid.

32-34. (canceled)

35. The composition of claim 30, wherein the carrier is conjugated directly to the saccharide.

36-40. (canceled)

41. The composition of claim 1, wherein the composition is pH 6 to pH 8.

42. The composition of claim 1, wherein the TLR7 agonist of formula (K) is the compound K2, [chemical structure]
or a pharmaceutically acceptable salt thereof.

43. The composition of claim 1, wherein the composition comprises a S. pneumoniae protein antigen.

44. A method of raising an immune response in a subject, comprising the step of administering to the subject the composition of claim 1.

45. (canceled)
